(19) United States
(12) Patent Application Publication
(10) Pub. No.: US 2002/0081680 A1
(43) Pub. Date: Jun. 27, 2002

(54) Compositions and methods for the therapy and diagnosis of prostate cancer

(76) Inventors: Jiangchun Xu, Bellevue, WA (US); Davin C. Dillon, Issaquah, WA (US); Jennifer L. Mitcham, Redmond, WA (US); Susan L. Harlocker, Seattle, WA (US); Yuqiu Jiang, Kent, WA (US); Michael D. Kalos, Seattle, WA (US); Gary R. Fanger, Mill Creek, WA (US); Marc W. Retter, Carnation, WA (US); John A. Stolk, Bothell, WA (US); Craig H. Day, Seattle, WA (US); Thomas S. Vedvick, Federal Way, WA (US); Darrick Carter, Seattle, WA (US); Samuel X. Li, Redmond, WA (US); Aijun Wang, Issaquah, WA (US); Yasir A. W. Skeiky, Bellevue, WA (US); William T. Hepler, Seattle, WA (US); Robert A. Henderson, Edmonds, WA (US); John Hural, Bainbridge Island, WA (US); Patricia D. McNeill, Federal Way, WA (US); Raymond L. Houghton, Bothell, WA (US); Carlota Vinals de Bassols, Rixensart (BE)

Correspondence Address: SEED INTELLECTUAL PROPERTY LAW GROUP PLLC, 701 FIFTH AVE, SUITE 6300, SEATTLE, WA, 98104-7092, US

(21) Appl. No.: 09/822,827

(22) Filed: Mar. 28, 2001

Related U.S. Application Data
(63) Continuation-in-part of application No. 09/780,669, filed on Feb. 9, 2001.
Application No. 09/780,669 is a continuation-in-part of application No. 09/679,272, filed on Oct. 4, 2000.
(60) Provisional application No. 60/157,455, filed on Apr. 17, 2000.

(51) Int. Cl. C07H 21/04; C12P 21/04; C12N 9/00; C07K 14/435; C12N 5/06

(52) U.S. Cl. 435/183; 435/69.7; 435/320.1; 435/325; 530/350; 536/23.2

(57) ABSTRACT

Compositions and methods for the therapy and diagnosis of cancer, particularly prostate cancer, are disclosed. Illustrative compositions comprise one or more prostate-specific polypeptides, immunogenic portions thereof, polynucleotides that encode such polypeptides, antigen presenting cell that expresses such polypeptides, and T cells that are specific for cells expressing such polypeptides. The disclosed compositions are useful, for example, in the diagnosis prevention and/or treatment of diseases, particularly prostate cancer.

### CROSS REFERENCE TO RELATED APPLICATIONS

[0001] This application is a continuation-in-part of U.S. patent application Ser. No. 09/679,272, filed Oct. 4, 2000, which claims priority to U.S. Provisional Application No. 60/157,455, filed Oct. 4, 1999; and is related to U.S. patent application Ser. No. 09/759,143, filed Jan. 12, 2001, U.S. patent application Ser. No. 09/709,729, filed Nov. 9, 2000, U.S. patent application Ser. No. 09/685,166, filed Oct. 10, 2000, U.S. patent application Ser. No. 09/679,426, filed Oct. 2, 2000, U.S. patent application Ser. No. 09/657,279, filed Sep. 6, 2000; U.S. application Ser. No. 09/651,236, filed Aug. 29, 2000; U.S. application Ser. No. 09/636,215, filed Aug. 9, 2000; U.S. application Ser. No. 09/605,783, filed Jun. 27, 2000; U.S. application Ser. No. 09/593,793, filed Jun. 13, 2000; U.S. application Ser. No. 09/510,737, filed May 12, 2000; U.S. application Ser. No. 09/568,100, filed May 9, 2000; each a CIP of the previously filed application and pending unless noted.

### TECHNICAL FIELD OF THE INVENTION

[0002] The present invention relates generally to therapy and diagnosis of cancer, such as prostate cancer. The invention is more specifically related to fusion proteins and polypeptides comprising at least a portion of a prostate-specific protein, and to polynucleotides encoding such polypeptides and fusion proteins. Such fusion proteins, polypeptides and polynucleotides are useful in pharmaceutical compositions, e.g., vaccines, and other compositions for the diagnosis and treatment of prostate cancer.

### BACKGROUND OF THE INVENTION

[0003] Cancer is a significant health problem throughout the world. Although advances have been made in detection and therapy of cancer, no vaccine or other universally successful method for prevention or treatment is currently available. Current therapies, which are generally based on a combination of chemotherapy or surgery and radiation, continue to prove inadequate in many patients.

[0004] Prostate cancer is the most common form of cancer among males, with an estimated incidence of 30% in men over the age of 50. Overwhelming clinical evidence shows that human prostate cancer has the propensity to metastasize to bone, and the disease appears to progress inevitably from androgen dependent to androgen refractory status, leading to increased patient mortality. This prevalent disease is currently the second leading cause of cancer death among men in the U.S.

[0005] In spite of considerable research into therapies for the disease, prostate cancer remains difficult to treat. Commonly, treatment is based on surgery and/or radiation therapy, but these methods are ineffective in a significant percentage of cases. Two previously identified prostate specific proteins—prostate specific antigen (PSA) and prostatic acid phosphatase (PAP)—have limited therapeutic and diagnostic potential. For example, PSA levels do not always correlate well with the presence of prostate cancer, being positive in a percentage of non-prostate cancer cases, including benign prostatic hyperplasia (BPH). Furthermore, PSA measurements correlate with prostate volume, and do not indicate the level of metastasis.

[0006] In spite of considerable research into therapies for these and other cancers, prostate cancer remains difficult to diagnose and treat effectively. Accordingly, there is a need in the art for improved methods for detecting and treating such cancers. The present invention fulfills these needs and further provides other related advantages.

### SUMMARY OF THE INVENTION

[0007] In one aspect, the present invention provides polynucleotide compositions comprising a sequence selected from the group consisting of:

[0008] (a) sequences provided in SEQ ID NO: 1-111, 115-171, 173-175, 177, 179-305, 307-315, 326, 328, 330, 332-335, 340-375, 381, 382, 384-476, 524, 526, 530, 531, 533, 535, 536, 552, 569-572, 587, 591, 593-606, 618-705, 709-774, 777, 789, 817, 823, 824, 878, 880-882, 894, 896, 907, 908, 916-919, 929-931, 938, 939 and 942;

[0009] (b) complements of the sequences provided in SEQ ID NO: 1-111, 115-171, 173-175, 177, 179-305, 307-315, 326, 328, 330, 332-335, 340-375, 381, 382, 384-476, 524, 526, 530, 531, 533, 535, 536, 552, 569-572, 587, 591, 593-606, 618-705, 709-774, 777, 789, 817, 823, 824, 878, 880-882, 894, 896, 907, 908, 916-919, 929-931, 938, 939 and 942;

[0010] (c) sequences consisting of at least 20 contiguous residues of a sequence provided in SEQ ID NO: 1-111, 115-171, 173-175, 177, 179-305, 307-315,326,328,330, 332-335, 340-375, 381, 382, 384-476, 524, 526, 530, 531, 533, 535, 536, 552, 569-572, 587, 591, 593-606, 618-705, 709-774, 777, 789, 817, 823, 824, 878, 880-882, 894, 896, 907, 908, 916-919, 929-931, 938, 939 and 942;

[0011] (d) sequences that hybridize to a sequence provided in SEQ ID NO: 1-111, 115-171, 173-175, 177, 179-305, 307-315, 326, 328, 330, 332-335, 340-375, 381, 382, 384-476, 524, 526, 530, 531, 533, 535, 536, 552, 569-572, 587, 591, 593-606, 618-705, 709-774, 777, 789, 817, 823, 824, 878, 880-882, 894, 896, 907, 908, 916-919, 929-931, 938, 939 and 942, under moderately stringent conditions;

[0012] (e) sequences having at least 75% identity to a sequence of SEQ ID NO: 1-111, 115-171, 173-175, 177, 179-305, 307-315, 326, 328, 330, 332-335, 340-375, 381, 382, 384-476, 524, 526, 530, 531, 533, 535, 536, 552, 569-572, 587, 591, 593-606, 618-705, 709-774, 777, 789, 817, 823, 824, 878, 880-882, 894, 896, 907, 908, 916-919, 929-931, 938, 939 and 942;

[0013] (f) sequences having at least 90% identity to a sequence of SEQ ID NO: 1-111, 115-171, 173-175, 177, 179-305, 307-315, 326, 328, 330, 332-335, 340-375, 381, 382, 384-476, 524, 526, 530, 531, 533, 535, 536, 552, 569-572, 587, 591, 593-606, 618-705, 709-774, 777, 789, 817, 823, 824, 878, 880-882, 894, 896, 907, 908, 916-919, 929-931, 938, 939 and 942; and

[0014] (g) degenerate variants of a sequence provided in SEQ ID NO: 1-111, 115-171, 173-175, 177, 179-305, 307-315, 326, 328, 330, 332-335, 340-375, 381, 382, 384-476, 524, 526, 530, 531, 533, 535, 536, 552, 569-572, 587, 591, 593-606, 618-705, 709-774, 777, 789, 817, 823, 824, 878, 880-882, 894, 896, 907, 908, 916-919, 929-931, 938, 939 and 942.

[0015] In one preferred embodiment, the polynucleotide compositions of the invention are expressed in at least about 20%, more preferably in at least about 30%, and most preferably in at least about 50% of prostate tissue samples tested, at a level that is at least about 2-fold, preferably at least about 5-fold, and most preferably at least about 10-fold higher than that for other normal tissues.

[0016] The present invention, in another aspect, provides polypeptide compositions comprising an amino acid sequence that is encoded by a polynucleotide sequence described above. In certain specific embodiments, such polypeptide compositions comprise an amino acid sequence selected from the group consisting of sequences recited in SEQ ID NO: 112-114, 172, 176, 178, 327, 329, 331, 336, 339, 376-380, 383, 477-483, 496, 504, 505, 519, 520, 522, 525, 527, 532, 534, 537-551, 553-568, 573-586, 588-590, 592, 706-708, 775, 776, 778, 780, 781, 811, 814, 818, 826, 827, 853, 855, 858, 860-862, 866-877, 879, 883-893, 895, 897, 898, 909-915, 920-928, 932-934, 940, 941 and 943.

[0017] In certain preferred embodiments, the polypeptides and/or polynucleotides of the present invention are immunogenic, i.e., they are capable of eliciting an immune response, particularly a humoral and/or cellular immune response, as further described herein.

[0018] The present invention further provides fragments, variants and/or derivatives of the disclosed polypeptide and/or polynucleotide sequences, wherein the fragments, variants and/or derivatives preferably have a level of immunogenic activity of at least about 50%, preferably at least about 70% and more preferably at least about 90% of the level of immunogenic activity of a polypeptide sequence set forth in SEQ ID NO: 112-114, 172, 176, 178, 327, 329, 331, 336, 339, 376-380, 383, 477-483, 496, 504, 505, 519, 520, 522, 525, 527, 532, 534, 537-551, 553-568, 573-586, 588-590, 592, 706-708, 775, 776, 778, 780, 781, 811, 814, 818, 826, 827, 853, 855, 858 and 860-862, or a polypeptide sequence encoded by a polynucleotide sequence set forth in SEQ ID NO: 1-111, 115-171, 173-175, 177, 179-305, 307-315, 326, 328, 330, 332-335, 340-375, 381, 382, 384-476, 524, 526, 530, 531, 533, 535, 536, 552, 569-572, 587, 591, 593-606, 618-705, 709-774, 777, 789, 817, 823, 824, 878, 880-882, 894, 896, 907, 908, 916-919, 929-931, 938, 939 and 942.

[0019] The present invention further provides polynucleotides that encode a polypeptide described above, expression vectors comprising such polynucleotides and host cells transformed or transfected with such expression vectors.

[0020] Within other aspects, the present invention provides pharmaceutical compositions comprising a polypeptide or polynucleotide as described above and a physiologically acceptable carrier.

[0021] Within a related aspect of the present invention, pharmaceutical compositions, e.g., vaccine compositions, are provided for prophylactic or therapeutic applications. Such compositions generally comprise an immunogenic polypeptide or polynucleotide of the invention and an immunostimulant, such as an adjuvant, together with a physiologically acceptable carrier.

[0022] The present invention further provides pharmaceutical compositions that comprise: (a) an antibody or antigen-binding fragment thereof that specifically binds to a polypeptide of the present invention, or a fragment thereof, and (b) a physiologically acceptable carrier.

[0023] Within further aspects, the present invention provides pharmaceutical compositions comprising: (a) an antigen presenting cell that expresses a polypeptide as described above and (b) a pharmaceutically acceptable carrier or excipient. Illustrative antigen presenting cells include dendritic cells, macrophages, monocytes, fibroblasts and B cells.

[0024] Within related aspects, pharmaceutical compositions are provided that comprise: (a) an antigen presenting cell that expresses a polypeptide as described above and (b) an immunostimulant.

[0025] The present invention further provides, in other aspects, fusion proteins that comprise at least one polypeptide as described above, as well as polynucleotides encoding such fusion proteins, typically in the form of pharmaceutical compositions, e.g., vaccine compositions, comprising a physiologically acceptable carrier and/or an immunostimulant. The fusions proteins may comprise multiple immunogenic polypeptides or portions/variants thereof, as described herein, and may further comprise one or more polypeptide segments for facilitating and/or enhancing the expression, purification and/or immunogenicity of the polypeptide(s). In certain embodiments, the fusion proteins disclosed herein comprise a polypeptide of the present invention and a known prostate antigen, or an epitope thereof.

[0026] Within further aspects, the present invention provides methods for stimulating an immune response in a patient, preferably a T cell response in a human patient, comprising administering a pharmaceutical composition described herein. The patient may be afflicted with prostate cancer, in which case the methods provide treatment for the disease, or a patient considered to be at risk for such a disease may be treated prophylactically.

[0027] Within further aspects, the present invention provides methods for inhibiting the development of a cancer in a patient, comprising administering to a patient a composition as recited above. The patient may be afflicted with prostate cancer, in which case the methods provide treatment for the disease, or a patient considered to be at risk for such a disease may be treated prophylactically.

[0028] The present invention further provides, within other aspects, methods for removing tumor cells from a biological sample, comprising contacting a biological sample with T cells that specifically react with a polypeptide of the present invention, wherein the step of contacting is performed under conditions and for a time sufficient to permit the removal of cells expressing the polypeptide from the sample.

[0029] Within related aspects, methods are provided for inhibiting the development of a cancer in a patient, comprising administering to a patient a biological sample treated as described above.

[0030] Methods are further provided, within other aspects, for stimulating and/or expanding T cells specific for a polypeptide of the present invention, comprising contacting T cells with one or more of: (i) a polypeptide as described above; (ii) a polynucleotide encoding such a polypeptide; and (iii) an antigen presenting cell that expresses such a polypeptide; under conditions and for a time sufficient to permit the stimulation and/or expansion of T cells. Isolated T cell populations comprising T cells prepared as described above are also provided.

[0031] Within further aspects, the present invention provides methods for inhibiting the development of a cancer in a patient, comprising administering to a patient an effective amount of a T cell population as described above.

[0032] The present invention further provides methods for inhibiting the development of a cancer in a patient, comprising the steps of: (a) incubating CD4⁺ and/or CD8⁺ T cells isolated from a patient with one or more of: (i) a polypeptide comprising at least an immunogenic portion of polypeptide disclosed herein; (ii) a polynucleotide encoding such a polypeptide; and (iii) an antigen-presenting cell that expressed such a polypeptide; and (b) administering to the patient an effective amount of the proliferated T cells, thereby inhibiting the development of a cancer in the patient. Proliferated cells may, but need not, be cloned prior to administration to the patient.

[0033] Within further aspects, the present invention provides methods for determining the presence or absence of a cancer, preferably a prostate cancer, in a patient comprising: (a) contacting a biological sample obtained from a patient with a binding agent that binds to a polypeptide as recited above; (b) detecting in the sample an amount of polypeptide that binds to the binding agent; and (c) comparing the amount of polypeptide with a predetermined cut-off value, and therefrom determining the presence or absence of a cancer in the patient. Within preferred embodiments, the binding agent is an antibody, more preferably a monoclonal antibody.

[0034] The present invention also provides, within other aspects, methods for monitoring the progression of a cancer in a patient. Such methods comprise the steps of: (a) contacting a biological sample obtained from a patient at a first point in time with a binding agent that binds to a polypeptide as recited above; (b) detecting in the sample an amount of polypeptide that binds to the binding agent; (c) repeating steps (a) and (b) using a biological sample obtained from the patient at a subsequent point in time; and (d) comparing the amount of polypeptide detected in step (c) with the amount detected in step (b), and therefrom monitoring the progression of the cancer in the patient.

[0035] The present invention further provides, within other aspects, methods for determining the presence or absence of a cancer in a patient, comprising the steps of: (a) contacting a biological sample obtained from a patient with an oligonucleotide that hybridizes to a polynucleotide of the present invention; (b) detecting in the sample a level of a polynucleotide, preferably mRNA, that hybridizes to the oligonucleotide; and (c) comparing the level of polynucleotide that hybridizes to the oligonucleotide with a predetermined cut-off value, and therefrom determining the presence or absence of a cancer in the patient. Within certain embodiments, the amount of mRNA is detected via polymerase chain reaction using, for example, at least one oligonucleotide primer that hybridizes to a polynucleotide of the present invention, or a complement of such a polynucleotide. Within other embodiments, the amount of mRNA is detected using a hybridization technique, employing an oligonucleotide probe that hybridizes to an inventive polynucleotide, or a complement of such a polynucleotide.

[0036] In related aspects, methods are provided for monitoring the progression of a cancer in a patient, comprising the steps of: (a) contacting a biological sample obtained from a patient with an oligonucleotide that hybridizes to a polynucleotide of the present invention; (b) detecting in the sample an amount of a polynucleotide that hybridizes to the oligonucleotide; (c) repeating steps (a) and (b) using a biological sample obtained from the patient at a subsequent point in time; and (d) comparing the amount of polynucleotide detected in step (c) with the amount detected in step (b), and therefrom monitoring the progression of the cancer in the patient.

[0037] Within further aspects, the present invention provides antibodies, such as monoclonal antibodies, that bind to a polypeptide as described above, as well as diagnostic kits comprising such antibodies. Diagnostic kits comprising one or more oligonucleotide probes or primers as described above are also provided.

[0038] These and other aspects of the present invention will become apparent upon reference to the following detailed description and attached drawings. All references disclosed herein are hereby incorporated by reference in their entirety as if each was incorporated individually.

### BRIEF DESCRIPTION OF THE DRAWINGS AND SEQUENCE IDENTIFIERS

[0039] FIG. 1 illustrates the ability of T cells to kill fibroblasts expressing the representative prostate-specific polypeptide P502S, as compared to control fibroblasts. The percentage lysis is shown as a series of effector:target ratios, as indicated.

[0040] FIGS. 2A and 2B illustrate the ability of T cells to recognize cells expressing the representative prostate-specific polypeptide P502S. In each case, the number of γ-interferon spots is shown for different numbers of responders. In FIG. 2A, data is presented for fibroblasts pulsed with the P2S-12 peptide, as compared to fibroblasts pulsed with a control E75 peptide. In FIG. 2B, data is presented for fibroblasts expressing P502S, as compared to fibroblasts expressing HER-2/neu.

[0041] FIG. 3 represents a peptide competition binding assay showing that the P1S#10 peptide, derived from P501S, binds HLA-A2. Peptide PlS#10 inhibits HLA-A2 restricted presentation of fluM58 peptide to CTL clone D150M58 in TNF release bioassay. D150M58 CTL is specific for the HLA-A2 binding influenza matrix peptide fluM58.

[0042] FIG. 4 illustrates the ability of T cell lines generated from P1S#10 immunized mice to specifically lyse P1S#10-pulsed Jurkat A2Kb targets and P501S-transduced Jurkat A2Kb targets, as compared to EGFP-transduced Jurkat A2Kb. The percent lysis is shown as a series of effector to target ratios, as indicated.

[0043] FIG. 5 illustrates the ability of a T cell clone to recognize and specifically lyse Jurkat A2Kb cells expressing the representative prostate-specific polypeptide P501S, thereby demonstrating that the PlS#10 peptide may be a naturally processed epitope of the P501S polypeptide.

[0044] FIGS. 6A and 6B are graphs illustrating the specificity of a CD8⁺ cell line (3A-1) for a representative prostate-specific antigen (P501S). FIG. 6A shows the results of a ⁵¹Cr release assay. The percent specific lysis is shown as a series of effector:target ratios, as indicated. FIG. 6B shows the production of interferon-gamma by 3A-1 cells stimulated with autologous B-LCL transduced with P501S, at varying effector:target rations as indicated.

[0045] FIG. 7 is a Western blot showing the expression of P501S in baculovirus.

[0046] FIG. 8 illustrates the results of epitope mapping studies on P501S.

[0047] FIG. 9 is a schematic representation of the P501S protein showing the location of transmembrane domains and predicted intracellular and extracellular domains.

[0048] FIG. 10 is a genomic map showing the location of the prostate genes P775P, P704P, B305D, P712P and P774P within the Cat Eye Syndrome region of chromosome 22q11.2

[0049] FIG. 11 shows the results of an ELISA assay to determine the specificity of rabbit polyclonal antisera raised against P501S.

[0050] SEQ ID NO: 1 is the determined cDNA sequence for F1-13

[0051] SEQ ID NO: 2 is the determined 3′ cDNA sequence for F1-12

[0052] SEQ ID NO: 3 is the determined 5′ cDNA sequence for F1-12

[0053] SEQ ID NO: 4 is the determined 3′ cDNA sequence for F1-16

[0054] SEQ ID NO: 5 is the determined 3′ cDNA sequence for H1-1

[0055] SEQ ID NO: 6 is the determined 3′ cDNA sequence for H1-9

[0056] SEQ ID NO: 7 is the determined 3′ cDNA sequence for H1-4

[0057] SEQ ID NO: 8 is the determined 3′ cDNA sequence for J1-17

[0058] SEQ ID NO: 9 is the determined 5′ cDNA sequence for J1-17

[0059] SEQ ID NO: 10 is the determined 3′ cDNA sequence for L1-12

[0060] SEQ ID NO: 11 is the determined 5′ cDNA sequence for L1-12

[0061] SEQ ID NO: 12 is the determined 3′ cDNA sequence for N1-1862

[0062] SEQ ID NO: 13 is the determined 5′ cDNA sequence for N1-1862

[0063] SEQ ID NO: 14 is the determined 3′ cDNA sequence for J1-13

[0064] SEQ ID NO: 15 is the determined 5′ cDNA sequence for J1-13

[0065] SEQ ID NO: 16 is the determined 3′ cDNA sequence for J1-19

[0066] SEQ ID NO: 17 is the determined 5′ cDNA sequence for J1-19

[0067] SEQ ID NO: 18 is the determined 3′ cDNA sequence for J1-25

[0068] SEQ ID NO: 19 is the determined 5° cDNA sequence for J1-25

[0069] SEQ ID NO: 20 is the determined 5′ cDNA sequence for J1-24

[0070] SEQ ID NO: 21 is the determined 3′ cDNA sequence for J1-24

[0071] SEQ ID NO: 22 is the determined 5° cDNA sequence for K1-58

[0072] SEQ ID NO: 23 is the determined 3° cDNA sequence for K1-58

[0073] SEQ ID NO: 24 is the determined 5′ cDNA sequence for K 1-63

[0074] SEQ ID NO: 25 is the determined 3′ cDNA sequence for K1-63

[0075] SEQ ID NO: 26 is the determined 5′ cDNA sequence for L1-4

[0076] SEQ ID NO: 27 is the determined 3′ cDNA sequence for L1-4

[0077] SEQ ID NO: 28 is the determined 5′ cDNA sequence for L1-14

[0078] SEQ ID NO: 29 is the determined 3′ cDNA sequence for L1-14

[0079] SEQ ID NO: 30 is the determined 3′ cDNA sequence for J1-12

[0080] SEQ ID NO: 31 is the determined 3′ cDNA sequence for J1-16

[0081] SEQ ID NO: 32 is the determined 3′ cDNA sequence for J1-21

[0082] SEQ ID NO: 33 is the determined 3′ cDNA sequence for K1-48

[0083] SEQ ID NO: 34 is the determined 3′ cDNA sequence for K1-55

[0084] SEQ ID NO: 35 is the determined 3′ cDNA sequence for L1-2

[0085] SEQ ID NO: 36 is the determined 3′ cDNA sequence for L1-6

[0086] SEQ ID NO: 37 is the determined 3′ cDNA sequence for N1-1858

[0087] SEQ ID NO: 38 is the determined 3′ cDNA sequence for N1-1860

[0088] SEQ ID NO: 39 is the determined 3′ cDNA sequence for N1-1861

[0089] SEQ ID NO: 40 is the determined 3′ cDNA sequence for N1-1864

[0090] SEQ ID NO: 41 is the determined cDNA sequence for P5

[0091] SEQ ID NO: 42 is the determined cDNA sequence for P8

[0092] SEQ ID NO: 43 is the determined cDNA sequence for P9

[0093] SEQ ID NO: 44 is the determined cDNA sequence for P18

[0094] SEQ ID NO: 45 is the determined cDNA sequence for P20

[0095] SEQ ID NO: 46 is the determined cDNA sequence for P29

[0096] SEQ ID NO: 47 is the determined cDNA sequence for P30

[0097] SEQ ID NO: 48 is the determined cDNA sequence for P34

[0098] SEQ ID NO: 49 is the determined cDNA sequence for P36

[0099] SEQ ID NO: 50 is the determined cDNA sequence for P38

[0100] SEQ ID NO: 51 is the determined cDNA sequence for P39

[0101] SEQ ID NO: 52 is the determined cDNA sequence for P42

[0102] SEQ ID NO: 53 is the determined cDNA sequence for P47

[0103] SEQ ID NO: 54 is the determined cDNA sequence for P49

[0104] SEQ ID NO: 55 is the determined cDNA sequence for P50

[0105] SEQ ID NO: 56 is the determined cDNA sequence for P53

[0106] SEQ ID NO: 57 is the determined cDNA sequence for P55

[0107] SEQ ID NO: 58 is the determined cDNA sequence for P60

[0108] SEQ ID NO: 59 is the determined cDNA sequence for P64

[0109] SEQ ID NO: 60 is the determined cDNA sequence for P65

[0110] SEQ ID NO: 61 is the determined cDNA sequence for P73

[0111] SEQ ID NO: 62 is the determined cDNA sequence for P75

[0112] SEQ ID NO: 63 is the determined cDNA sequence for P76

[0113] SEQ ID NO: 64 is the determined cDNA sequence for P79

[0114] SEQ ID NO: 65 is the determined cDNA sequence for P84

[0115] SEQ ID NO: 66 is the determined cDNA sequence for P68

[0116] SEQ ID NO: 67 is the determined cDNA sequence for P80 (also referred to as P704P)

[0117] SEQ ID NO: 68 is the determined cDNA sequence for P82

[0118] SEQ ID NO: 69 is the determined cDNA sequence for U1-3064

[0119] SEQ ID NO: 70 is the determined cDNA sequence for U1-3065

[0120] SEQ ID NO: 71 is the determined cDNA sequence for V1-3692

[0121] SEQ ID NO: 72 is the determined cDNA sequence for 1A-3905

[0122] SEQ ID NO: 73 is the determined cDNA sequence for V1-3686

[0123] SEQ ID NO: 74 is the determined cDNA sequence for R1-2330

[0124] SEQ ID NO: 75 is the determined cDNA sequence for 1B-3976

[0125] SEQ ID NO: 76 is the determined cDNA sequence for V1-3679

[0126] SEQ ID NO: 77 is the determined cDNA sequence for 1G-4736

[0127] SEQ ID NO: 78 is the determined cDNA sequence for 1G-4738

[0128] SEQ ID NO: 79 is the determined cDNA sequence for 1G-4741

[0129] SEQ ID NO: 80 is the determined cDNA sequence for 1G-4744

[0130] SEQ ID NO: 81 is the determined cDNA sequence for 1G-4734

[0131] SEQ ID NO: 82 is the determined cDNA sequence for 1H-4774

[0132] SEQ ID NO: 83 is the determined cDNA sequence for 1H-4781

[0133] SEQ ID NO: 84 is the determined cDNA sequence for 1H-4785

[0134] SEQ ID NO: 85 is the determined cDNA sequence for 1H-4787

[0135] SEQ ID NO: 86 is the determined cDNA sequence for 1H-4796

[0136] SEQ ID NO: 87 is the determined cDNA sequence for 1I-4807

[0137] SEQ ID NO: 88 is the determined cDNA sequence for 1I-4810

[0138] SEQ ID NO: 89 is the determined cDNA sequence for 1I-4811

[0139] SEQ ID NO: 90 is the determined cDNA sequence for 1J-4876

[0140] SEQ ID NO: 91 is the determined cDNA sequence for 1K-4884

[0141] SEQ ID NO: 92 is the determined cDNA sequence for 1K-4896

[0142] SEQ ID NO: 93 is the determined cDNA sequence for 1G-4761

[0143] SEQ ID NO: 94 is the determined cDNA sequence for 1G-4762

[0144] SEQ ID NO: 95 is the determined cDNA sequence for 1H-4766

[0145] SEQ ID NO: 96 is the determined cDNA sequence for 1H-4770

[0146] SEQ ID NO: 97 is the determined cDNA sequence for 1H-4771

[0147] SEQ ID NO: 98 is the determined cDNA sequence for 1H-4772

[0148] SEQ ID NO: 99 is the determined cDNA sequence for 1D-4297

[0149] SEQ ID NO: 100 is the determined cDNA sequence for 1D-4309

[0150] SEQ ID NO: 101 is the determined cDNA sequence for 1D.1-4278

[0151] SEQ ID NO: 102 is the determined cDNA sequence for 1D-4288

[0152] SEQ ID NO: 103 is the determined cDNA sequence for 1D-4283

[0153] SEQ ID NO: 104 is the determined cDNA sequence for 1D-4304

[0154] SEQ ID NO: 105 is the determined cDNA sequence for 1D-4296

[0155] SEQ ID NO: 106 is the determined cDNA sequence for 1D-4280

[0156] SEQ ID NO: 107 is the determined full length cDNA sequence for F1-12 (also referred to as P504S)

[0157] SEQ ID NO: 108 is the predicted amino acid sequence for F1-12

[0158] SEQ ID NO: 109 is the determined full length cDNA sequence for J1-17

[0159] SEQ ID NO: 110 is the determined full length cDNA sequence for L1-12 (also referred to as P501S)

[0160] SEQ ID NO: 111 is the determined full length cDNA sequence for N1-1862 (also referred to as P503S)

[0161] SEQ ID NO: 112 is the predicted amino acid sequence for J1-17

[0162] SEQ ID NO: 113 is the predicted amino acid sequence for L1-12 (also referred to as P501S)

[0163] SEQ ID NO: 114 is the predicted amino acid sequence for N1-1862 (also referred to as P503S)

[0164] SEQ ID NO: 115 is the determined cDNA sequence for P89

[0165] SEQ ID NO: 116 is the determined cDNA sequence for P90

[0166] SEQ ID NO: 117 is the determined cDNA sequence for P92

[0167] SEQ ID NO: 118 is the determined cDNA sequence for P95

[0168] SEQ ID NO: 119 is the determined cDNA sequence for P98

[0169] SEQ ID NO: 120 is the determined cDNA sequence for P102

[0170] SEQ ID NO: 121 is the determined cDNA sequence for P110

[0171] SEQ ID NO: 122 is the determined cDNA sequence for P111

[0172] SEQ ID NO: 123 is the determined cDNA sequence for P114

[0173] SEQ ID NO: 124 is the determined cDNA sequence for P115

[0174] SEQ ID NO: 125 is the determined cDNA sequence for P116

[0175] SEQ ID NO: 126 is the determined cDNA sequence for P124

[0176] SEQ ID NO: 127 is the determined cDNA sequence for P126

[0177] SEQ ID NO: 128 is the determined cDNA sequence for P130

[0178] SEQ ID NO: 129 is the determined cDNA sequence for P133

[0179] SEQ ID NO: 130 is the determined cDNA sequence for P138

[0180] SEQ ID NO: 131 is the determined cDNA sequence for P143

[0181] SEQ ID NO: 132 is the determined cDNA sequence for P151

[0182] SEQ ID NO: 133 is the determined cDNA sequence for P156

[0183] SEQ ID NO: 134 is the determined cDNA sequence for P157

[0184] SEQ ID NO: 135 is the determined cDNA sequence for P166

[0185] SEQ ID NO: 136 is the determined cDNA sequence for P176

[0186] SEQ ID NO: 137 is the determined cDNA sequence for P178

[0187] SEQ ID NO: 138 is the determined cDNA sequence for P179

[0188] SEQ ID NO: 139 is the determined cDNA sequence for P185

[0189] SEQ ID NO: 140 is the determined cDNA sequence for P192

[0190] SEQ ID NO: 141 is the determined cDNA sequence for P201

[0191] SEQ ID NO: 142 is the determined cDNA sequence for P204

[0192] SEQ ID NO: 143 is the determined cDNA sequence for P208

[0193] SEQ ID NO: 144 is the determined cDNA sequence for P211

[0194] SEQ ID NO: 145 is the determined cDNA sequence for P213

[0195] SEQ ID NO: 146 is the determined cDNA sequence for P219

[0196] SEQ ID NO: 147 is the determined cDNA sequence for P237

[0197] SEQ ID NO: 148 is the determined cDNA sequence for P239

[0198] SEQ ID NO: 149 is the determined cDNA sequence for P248

[0199] SEQ ID NO: 150 is the determined cDNA sequence for P251

[0200] SEQ ID NO: 151 is the determined cDNA sequence for P255

[0201] SEQ ID NO: 152 is the determined cDNA sequence for P256

[0202] SEQ ID NO: 153 is the determined cDNA sequence for P259

[0203] SEQ ID NO: 154 is the determined cDNA sequence for P260

[0204] SEQ ID NO: 155 is the determined cDNA sequence for P263

[0205] SEQ ID NO: 156 is the determined cDNA sequence for P264

[0206] SEQ ID NO: 157 is the determined cDNA sequence for P266

[0207] SEQ ID NO: 158 is the determined cDNA sequence for P270

[0208] SEQ ID NO: 159 is the determined cDNA sequence for P272

[0209] SEQ ID NO: 160 is the determined cDNA sequence for P278

[0210] SEQ ID NO: 161 is the determined cDNA sequence for P105

[0211] SEQ ID NO: 162 is the determined cDNA sequence for P107

[0212] SEQ ID NO: 163 is the determined cDNA sequence for P137

[0213] SEQ ID NO: 164 is the determined cDNA sequence for P194

[0214] SEQ ID NO: 165 is the determined cDNA sequence for P195

[0215] SEQ ID NO: 166 is the determined cDNA sequence for P196

[0216] SEQ ID NO: 167 is the determined cDNA sequence for P220

[0217] SEQ ID NO: 168 is the determined cDNA sequence for P234

[0218] SEQ ID NO: 169 is the determined cDNA sequence for P235

[0219] SEQ ID NO: 170 is the determined cDNA sequence for P243

[0220] SEQ ID NO: 171 is the determined cDNA sequence for P703P-DE1

[0221] SEQ ID NO: 172 is the predicted amino acid sequence for P703P-DE1

[0222] SEQ ID NO: 173 is the determined cDNA sequence for P703P-DE2

[0223] SEQ ID NO: 174 is the determined cDNA sequence for P703P-DE6

[0224] SEQ ID NO: 175 is the determined cDNA sequence for P703P-DE13

[0225] SEQ ID NO: 176 is the predicted amino acid sequence for P703P-DE13

[0226] SEQ ID NO: 177 is the determined cDNA sequence for P703P-DE14

[0227] SEQ ID NO: 178 is the predicted amino acid sequence for P703P-DE14

[0228] SEQ ID NO: 179 is the determined extended cDNA sequence for 1G-4736

[0229] SEQ ID NO: 180 is the determined extended cDNA sequence for 1G-4738

[0230] SEQ ID NO: 181 is the determined extended cDNA sequence for 1G-4741

[0231] SEQ ID NO: 182 is the determined extended cDNA sequence for 1G-4744

[0232] SEQ ID NO: 183 is the determined extended cDNA sequence for 1H-4774

[0233] SEQ ID NO: 184 is the determined extended cDNA sequence for 1H-4781

[0234] SEQ ID NO: 185 is the determined extended cDNA sequence for 1H-4785

[0235] SEQ ID NO: 186 is the determined extended cDNA sequence for 1H-4787

[0236] SEQ ID NO: 187 is the determined extended cDNA sequence for 1H-4796

[0237] SEQ ID NO: 188 is the determined extended cDNA sequence for 1I-4807

[0238] SEQ ID NO: 189 is the determined 3′ cDNA sequence for 1I-4810

[0239] SEQ ID NO: 190 is the determined 3° cDNA sequence for 1I-4811

[0240] SEQ ID NO: 191 is the determined extended cDNA sequence for 1J-4876

[0241] SEQ ID NO: 192 is the determined extended cDNA sequence for 1K-4884

[0242] SEQ ID NO: 193 is the determined extended cDNA sequence for 1K-4896

[0243] SEQ ID NO: 194 is the determined extended cDNA sequence for 1G-4761

[0244] SEQ ID NO: 195 is the determined extended cDNA sequence for 1G-4762

[0245] SEQ ID NO: 196 is the determined extended cDNA sequence for 1H-4766

[0246] SEQ ID NO: 197 is the determined 3′ cDNA sequence for 1H-4770

[0247] SEQ ID NO: 198 is the determined 3′ cDNA sequence for 1H-4771

[0248] SEQ ID NO: 199 is the determined extended cDNA sequence for 1H-4772

[0249] SEQ ID NO: 200 is the determined extended cDNA sequence for 1D-4309

[0250] SEQ ID NO: 201 is the determined extended cDNA sequence for 1D.1-4278

[0251] SEQ ID NO: 202 is the determined extended cDNA sequence for 1D-4288

[0252] SEQ ID NO: 203 is the determined extended cDNA sequence for 1D-4283

[0253] SEQ ID NO: 204 is the determined extended cDNA sequence for 1D-4304

[0254] SEQ ID NO: 205 is the determined extended cDNA sequence for 1D-4296

[0255] SEQ ID NO: 206 is the determined extended cDNA sequence for 1D-4280

[0256] SEQ ID NO: 207 is the determined cDNA sequence for 10-d8fwd

[0257] SEQ ID NO: 208 is the determined cDNA sequence for 10-H10con

[0258] SEQ ID NO: 209 is the determined cDNA sequence for 11-C8rev

[0259] SEQ ID NO: 210 is the determined cDNA sequence for 7.g6fwd

[0260] SEQ ID NO: 211 is the determined cDNA sequence for 7.g6rev

[0261] SEQ ID NO: 212 is the determined cDNA sequence for 8-b5fwd

[0262] SEQ ID NO: 213 is the determined cDNA sequence for 8-b5rev

[0263] SEQ ID NO: 214 is the determined cDNA sequence for 8-b6fwd

[0264] SEQ ID NO: 215 is the determined cDNA sequence for 8-b6 rev

[0265] SEQ ID NO: 216 is the determined cDNA sequence for 8-d4fwd

[0266] SEQ ID NO: 217 is the determined cDNA sequence for 8-d9rev

[0267] SEQ ID NO: 218 is the determined cDNA sequence for 8-g3fwd

[0268] SEQ ID NO: 219 is the determined cDNA sequence for 8-g3rev

[0269] SEQ ID NO: 220 is the determined cDNA sequence for 8-h11rev

[0270] SEQ ID NO: 221 is the determined cDNA sequence for g-f12fwd

[0271] SEQ ID NO: 222 is the determined cDNA sequence for g-f3rev

[0272] SEQ ID NO: 223 is the determined cDNA sequence for P509S

[0273] SEQ ID NO: 224 is the determined cDNA sequence for P510S

[0274] SEQ ID NO: 225 is the determined cDNA sequence for P703DE5

[0275] SEQ ID NO: 226 is the determined cDNA sequence for 9-A11

[0276] SEQ ID NO: 227 is the determined cDNA sequence for 8-C6

[0277] SEQ ID NO: 228 is the determined cDNA sequence for 8-H7

[0278] SEQ ID NO: 229 is the determined cDNA sequence for JPTPN13

[0279] SEQ ID NO: 230 is the determined cDNA sequence for JPTPN14

[0280] SEQ ID NO: 231 is the determined cDNA sequence for JPTPN23

[0281] SEQ ID NO: 232 is the determined cDNA sequence for JPTPN24

[0282] SEQ ID NO: 233 is the determined cDNA sequence for JPTPN25

[0283] SEQ ID NO: 234 is the determined cDNA sequence for JPTPN30

[0284] SEQ ID NO: 235 is the determined cDNA sequence for JPTPN34

[0285] SEQ ID NO: 236 is the determined cDNA sequence for JPTPN35

[0286] SEQ ID NO: 237 is the determined cDNA sequence for JPTPN36

[0287] SEQ ID NO: 238 is the determined cDNA sequence for JPTPN38

[0288] SEQ ID NO: 239 is the determined cDNA sequence for JPTPN39

[0289] SEQ ID NO: 240 is the determined cDNA sequence for JPTPN40

[0290] SEQ ID NO: 241 is the determined cDNA sequence for JPTPN41

[0291] SEQ ID NO: 242 is the determined cDNA sequence for JPTPN42

[0292] SEQ ID NO: 243 is the determined cDNA sequence for JPTPN45

[0293] SEQ ID NO: 244 is the determined cDNA sequence for JPTPN46

[0294] SEQ ID NO: 245 is the determined cDNA sequence for JPTPN51

[0295] SEQ ID NO: 246 is the determined cDNA sequence for JPTPN56

[0296] SEQ ID NO: 247 is the determined cDNA sequence for PTPN64

[0297] SEQ ID NO: 248 is the determined cDNA sequence for JPTPN65

[0298] SEQ ID NO: 249 is the determined cDNA sequence for JPTPN67

[0299] SEQ ID NO: 250 is the determined cDNA sequence for JPTPN76

[0300] SEQ ID NO: 251 is the determined cDNA sequence for JPTPN84

[0301] SEQ ID NO: 252 is the determined cDNA sequence for JPTPN85

[0302] SEQ ID NO: 253 is the determined cDNA sequence for JPTPN86

[0303] SEQ ID NO: 254 is the determined cDNA sequence for JPTPN87

[0304] SEQ ID NO: 255 is the determined cDNA sequence for JPTPN88

[0305] SEQ ID NO: 256 is the determined cDNA sequence for JP1F1

[0306] SEQ ID NO: 257 is the determined cDNA sequence for JP1F2

[0307] SEQ ID NO: 258 is the determined cDNA sequence for JP1C2

[0308] SEQ ID NO: 259 is the determined cDNA sequence for JP1B1

[0309] SEQ ID NO: 260 is the determined cDNA sequence for JP1B2

[0310] SEQ ID NO: 261 is the determined cDNA sequence for JP1D3

[0311] SEQ ID NO: 262 is the determined cDNA sequence for JP1A4

[0312] SEQ ID NO: 263 is the determined cDNA sequence for JP1F5

[0313] SEQ ID NO: 264 is the determined cDNA sequence for JP1E6

[0314] SEQ ID NO: 265 is the determined cDNA sequence for JP1D6

[0315] SEQ ID NO: 266 is the determined cDNA sequence for JP1B5

[0316] SEQ ID NO: 267 is the determined cDNA sequence for JP1A6

[0317] SEQ ID NO: 268 is the determined cDNA sequence for JP1E8

[0318] SEQ ID NO: 269 is the determined cDNA sequence for JP1D7

[0319] SEQ ID NO: 270 is the determined cDNA sequence for JP1D9

[0320] SEQ ID NO: 271 is the determined cDNA sequence for JP1C10

[0321] SEQ ID NO: 272 is the determined cDNA sequence for JP1A9

[0322] SEQ ID NO: 273 is the determined cDNA sequence for JP1F12

[0323] SEQ ID NO: 274 is the determined cDNA sequence for JP1E12

[0324] SEQ ID NO: 275 is the determined cDNA sequence for JP1D11

[0325] SEQ ID NO: 276 is the determined cDNA sequence for JP1C11

[0326] SEQ ID NO: 277 is the determined cDNA sequence for JP1C12

[0327] SEQ ID NO: 278 is the determined cDNA sequence for JP1B12

[0328] SEQ ID NO: 279 is the determined cDNA sequence for JP1A12

[0329] SEQ ID NO: 280 is the determined cDNA sequence for JP8G2

[0330] SEQ ID NO: 281 is the determined cDNA sequence for JP8H1

[0331] SEQ ID NO: 282 is the determined cDNA sequence for JP8H2

[0332] SEQ ID NO: 283 is the determined cDNA sequence for JP8A3

[0333] SEQ ID NO: 284 is the determined cDNA sequence for JP8A4

[0334] SEQ ID NO: 285 is the determined cDNA sequence for JP8C3

[0335] SEQ ID NO: 286 is the determined cDNA sequence for JP8G4

[0336] SEQ ID NO: 287 is the determined cDNA sequence for JP8B6

[0337] SEQ ID NO: 288 is the determined cDNA sequence for JP8D6

[0338] SEQ ID NO: 289 is the determined cDNA sequence for JP8F5

[0339] SEQ ID NO: 290 is the determined cDNA sequence for JP8A8

[0340] SEQ ID NO: 291 is the determined cDNA sequence for JP8C7

[0341] SEQ ID NO: 292 is the determined cDNA sequence for JP8D7

[0342] SEQ ID NO: 293 is the determined cDNA sequence for P8D8

[0343] SEQ ID NO: 294 is the determined cDNA sequence for JP8E7

[0344] SEQ ID NO: 295 is the determined cDNA sequence for JP8F8

[0345] SEQ ID NO: 296 is the determined cDNA sequence for JP8G8

[0346] SEQ ID NO: 297 is the determined cDNA sequence for JP8B10

[0347] SEQ ID NO: 298 is the determined cDNA sequence for JP8C10

[0348] SEQ ID NO: 299 is the determined cDNA sequence for JP8E9

[0349] SEQ ID NO: 300 is the determined cDNA sequence for JP8E10

[0350] SEQ ID NO: 301 is the determined cDNA sequence for JP8F9

[0351] SEQ ID NO: 302 is the determined cDNA sequence for JP8H9

[0352] SEQ ID NO: 303 is the determined cDNA sequence for JP8C12

[0353] SEQ ID NO: 304 is the determined cDNA sequence for JP8E11

[0354] SEQ ID NO: 305 is the determined cDNA sequence for JP8E12

[0355] SEQ ID NO: 306 is the amino acid sequence for the peptide PS2#12

[0356] SEQ ID NO: 307 is the determined cDNA sequence for P711P

[0357] SEQ ID NO: 308 is the determined cDNA sequence for P712P

[0358] SEQ ID NO: 309 is the determined cDNA sequence for CLONE23

[0359] SEQ ID NO: 310 is the determined cDNA sequence for P774P

[0360] SEQ ID NO: 311 is the determined cDNA sequence for P775P

[0361] SEQ ID NO: 312 is the determined cDNA sequence for P715P

[0362] SEQ ID NO: 313 is the determined cDNA sequence for P710P

[0363] SEQ ID NO: 314 is the determined cDNA sequence for P767P

[0364] SEQ ID NO: 315 is the determined cDNA sequence for P768P

[0365] SEQ ID NO: 316-325 are the determined cDNA sequences of previously isolated genes

[0366] SEQ ID NO: 326 is the determined cDNA sequence for P703PDE5

[0367] SEQ ID NO: 327 is the predicted amino acid sequence for P703PDE5

[0368] SEQ ID NO: 328 is the determined cDNA sequence for P703P6.26

[0369] SEQ ID NO: 329 is the predicted amino acid sequence for P703P6.26

[0370] SEQ ID NO: 330 is the determined cDNA sequence for P703PX-23

[0371] SEQ ID NO: 331 is the predicted amino acid sequence for P703PX-23

[0372] SEQ ID NO: 332 is the determined full length cDNA sequence for P509S

[0373] SEQ ID NO: 333 is the determined extended cDNA sequence for P707P (also referred to as 11-C9)

[0374] SEQ ID NO: 334 is the determined cDNA sequence for P714P

[0375] SEQ ID NO: 335 is the determined cDNA sequence for P705P (also referred to as 9-F3)

[0376] SEQ ID NO: 336 is the predicted amino acid sequence for P705P

[0377] SEQ ID NO: 337 is the amino acid sequence of the peptide P1 S#10

[0378] SEQ ID NO: 338 is the amino acid sequence of the peptide p5

[0379] SEQ ID NO: 339 is the predicted amino acid sequence of P509S

[0380] SEQ ID NO: 340 is the determined cDNA sequence for P778P

[0381] SEQ ID NO: 341 is the determined cDNA sequence for P786P

[0382] SEQ ID NO: 342 is the determined cDNA sequence for P789P

[0383] SEQ ID NO: 343 is the determined cDNA sequence for a clone showing homology to Homo sapiens MM46 mRNA

[0384] SEQ ID NO: 344 is the determined cDNA sequence for a clone showing homology to Homo sapiens TNF-alpha stimulated ABC protein (ABC50) mRNA

[0385] SEQ ID NO: 345 is the determined cDNA sequence for a clone showing homology to Homo sapiens mRNA for E-cadherin

[0386] SEQ ID NO: 346 is the determined cDNA sequence for a clone showing homology to Human nuclear-encoded mitochondrial serine hydroxymethyltransferase (SHMT)

[0387] SEQ ID NO: 347 is the determined cDNA sequence for a clone showing homology to Homo sapiens natural resistance-associated macrophage protein2 (NRAMP2)

[0388] SEQ ID NO: 348 is the determined cDNA sequence for a clone showing homology to Homo sapiens phosphoglucomutase-related protein (PGMRP)

[0389] SEQ ID NO: 349 is the determined cDNA sequence for a clone showing homology to Human mRNA for proteosome subunit p40

[0390] SEQ ID NO: 350 is the determined cDNA sequence for P777P

[0391] SEQ ID NO: 351 is the determined cDNA sequence for P779P

[0392] SEQ ID NO: 352 is the determined cDNA sequence for P790P

[0393] SEQ ID NO: 353 is the determined cDNA sequence for P784P

[0394] SEQ ID NO: 354 is the determined cDNA sequence for P776P

[0395] SEQ ID NO: 355 is the determined cDNA sequence for P780P

[0396] SEQ ID NO: 356 is the determined cDNA sequence for P544S

[0397] SEQ ID NO: 357 is the determined cDNA sequence for P745S

[0398] SEQ ID NO: 358 is the determined cDNA sequence for P782P

[0399] SEQ ID NO: 359 is the determined cDNA sequence for P783P

[0400] SEQ ID NO: 360 is the determined cDNA sequence for unknown 17984

[0401] SEQ ID NO: 361 is the determined cDNA sequence for P787P

[0402] SEQ ID NO: 362 is the determined cDNA sequence for P788P

[0403] SEQ ID NO: 363 is the determined cDNA sequence for unknown 17994

[0404] SEQ ID NO: 364 is the determined cDNA sequence for P781P

[0405] SEQ ID NO: 365 is the determined cDNA sequence for P785P

[0406] SEQ ID NO: 366-375 are the determined cDNA sequences for splice variants of B305D.

[0407] SEQ ID NO: 376 is the predicted amino acid sequence encoded by the sequence of SEQ ID NO: 366.

[0408] SEQ ID NO: 377 is the predicted amino acid sequence encoded by the sequence of SEQ ID NO: 372.

[0409] SEQ ID NO: 378 is the predicted amino acid sequence encoded by the sequence of SEQ ID NO: 373.

[0410] SEQ ID NO: 379 is the predicted amino acid sequence encoded by the sequence of SEQ ID NO: 374.

[0411] SEQ ID NO: 380 is the predicted amino acid sequence encoded by the sequence of SEQ ID NO: 375.

[0412] SEQ ID NO: 381 is the determined cDNA sequence for B716P.

[0413] SEQ ID NO: 382 is the determined full-length cDNA sequence for P711P.

[0414] SEQ ID NO: 383 is the amino acid sequence for P711P.

[0415] SEQ ID NO: 384 is the cDNA sequence for P1000C.

[0416] SEQ ID NO: 385 is the cDNA sequence for CGI-82.

[0417] SEQ ID NO:386 is the cDNA sequence for 23320.

[0418] SEQ ID NO:387 is the cDNA sequence for CGI-69.

[0419] SEQ ID NO:388 is the cDNA sequence for L-iditol-2-dehydrogenase.

[0420] SEQ ID NO:389 is the cDNA sequence for 23379.

[0421] SEQ ID NO:390 is the cDNA sequence for 23381.

[0422] SEQ ID NO:391 is the cDNA sequence for KIAA0122.

[0423] SEQ ID NO:392 is the cDNA sequence for 23399.

[0424] SEQ ID NO:393 is the cDNA sequence for a previously identified gene.

[0425] SEQ ID NO:394 is the cDNA sequence for HCLBP.

[0426] SEQ ID NO:395 is the cDNA sequence for transglutaminase.

[0427] SEQ ID NO:396 is the cDNA sequence for a previously identified gene.

[0428] SEQ ID NO:397 is the cDNA sequence for PAP.

[0429] SEQ ID NO:398 is the cDNA sequence for Ets transcription factor PDEF.

[0430] SEQ ID NO:399 is the cDNA sequence for hTGR.

[0431] SEQ ID NO:400 is the cDNA sequence for KIAA0295.

[0432] SEQ ID NO:401 is the cDNA sequence for 22545.

[0433] SEQ ID NO:402 is the cDNA sequence for 22547.

[0434] SEQ ID NO:403 is the cDNA sequence for 22548.

[0435] SEQ ID NO:404 is the cDNA sequence for 22550.

[0436] SEQ ID NO:405 is the cDNA sequence for 22551.

[0437] SEQ ID NO:406 is the cDNA sequence for 22552.

[0438] SEQ ID NO:407 is the cDNA sequence for 22553 (also known as P1020C).

[0439] SEQ ID NO:408 is the cDNA sequence for 22558.

[0440] SEQ ID NO:409 is the cDNA sequence for 22562.

[0441] SEQ ID NO:410 is the cDNA sequence for 22565.

[0442] SEQ ID NO:411 is the cDNA sequence for 22567.

[0443] SEQ ID NO:412 is the cDNA sequence for 22568.

[0444] SEQ ID NO:413 is the cDNA sequence for 22570.

[0445] SEQ ID NO:414 is the cDNA sequence for 22571.

[0446] SEQ ID NO:415 is the cDNA sequence for 22572.

[0447] SEQ ID NO:416 is the cDNA sequence for 22573.

[0448] SEQ ID NO:417 is the cDNA sequence for 22573.

[0449] SEQ ID NO:418 is the cDNA sequence for 22575.

[0450] SEQ ID NO:419 is the cDNA sequence for 22580.

[0451] SEQ ID NO:420 is the cDNA sequence for 22581.

[0452] SEQ ID NO:421 is the cDNA sequence for 22582.

[0453] SEQ ID NO:422 is the cDNA sequence for 22583.

[0454] SEQ ID NO:423 is the cDNA sequence for 22584.

[0455] SEQ ID NO:424 is the cDNA sequence for 22585.

[0456] SEQ ID NO:425 is the cDNA sequence for 22586.

[0457] SEQ ID NO:426 is the cDNA sequence for 22587.

[0458] SEQ ID NO:427 is the cDNA sequence for 22588.

[0459] SEQ ID NO:428 is the cDNA sequence for 22589.

[0460] SEQ ID NO:429 is the cDNA sequence for 22590.

[0461] SEQ ID NO:430 is the cDNA sequence for 22591.

[0462] SEQ ID NO:431 is the cDNA sequence for 22592.

[0463] SEQ ID NO:432 is the cDNA sequence for 22593.

[0464] SEQ ID NO:433 is the cDNA sequence for 22594.

[0465] SEQ ID NO:434 is the cDNA sequence for 22595.

[0466] SEQ ID NO:435 is the cDNA sequence for 22596.

[0467] SEQ ID NO:436 is the cDNA sequence for 22847.

[0468] SEQ ID NO:437 is the cDNA sequence for 22848.

[0469] SEQ ID NO:438 is the cDNA sequence for 22849.

[0470] SEQ ID NO:439 is the cDNA sequence for 22851.

[0471] SEQ ID NO:440 is the cDNA sequence for 22852.

[0472] SEQ ID NO:441 is the cDNA sequence for 22853.

[0473] SEQ ID NO:442 is the cDNA sequence for 22854.

[0474] SEQ ID NO:443 is the cDNA sequence for 22855.

[0475] SEQ ID NO:444 is the cDNA sequence for 22856.

[0476] SEQ ID NO:445 is the cDNA sequence for 22857.

[0477] SEQ ID NO:446 is the cDNA sequence for 23601.

[0478] SEQ ID NO:447 is the cDNA sequence for 23602.

[0479] SEQ ID NO:448 is the cDNA sequence for 23605.

[0480] SEQ ID NO:449 is the cDNA sequence for 23606.

[0481] SEQ ID NO:450 is the cDNA sequence for 23612.

[0482] SEQ ID NO:451 is the cDNA sequence for 23614.

[0483] SEQ ID NO:452 is the cDNA sequence for 23618.

[0484] SEQ ID NO:453 is the cDNA sequence for 23622.

[0485] SEQ ID NO:454 is the cDNA sequence for folate hydrolase.

[0486] SEQ ID NO:455 is the cDNA sequence for LIM protein.

[0487] SEQ ID NO:456 is the cDNA sequence for a known gene.

[0488] SEQ ID NO:457 is the cDNA sequence for a known gene.

[0489] SEQ ID NO:458 is the cDNA sequence for a previously identified gene.

[0490] SEQ ID NO:459 is the cDNA sequence for 23045.

[0491] SEQ ID NO:460 is the cDNA sequence for 23032.

[0492] SEQ ID NO:461 is the cDNA sequence for clone 23054.

[0493] SEQ ID NO:462-467 are cDNA sequences for known genes.

[0494] SEQ ID NO:468-471 are cDNA sequences for P710P.

[0495] SEQ ID NO:472 is a cDNA sequence for P1001C.

[0496] SEQ ID NO: 473 is the determined cDNA sequence for a first splice variant of P775P (referred to as 27505).

[0497] SEQ ID NO: 474 is the determined cDNA sequence for a second splice variant of P775P (referred to as 19947).

[0498] SEQ ID NO: 475 is the determined cDNA sequence for a third splice variant of P775P (referred to as 19941).

[0499] SEQ ID NO: 476 is the determined cDNA sequence for a fourth splice variant of P775P (referred to as 19937).

[0500] SEQ ID NO: 477 is a first amino acid sequence encoded by the sequence of

[0501] SEQ ID NO: 474.

[0502] SEQ ID NO: 478 is a second amino acid sequence encoded by the sequence of SEQ ID NO: 474.

[0503] SEQ ID NO: 479 is the amino acid sequence encoded by the sequence of

[0504] SEQ ID NO: 475.

[0505] SEQ ID NO: 480 is a first amino acid sequence encoded by the sequence of

[0506] SEQ ID NO: 473.

[0507] SEQ ID NO: 481 is a second amino acid sequence encoded by the sequence of SEQ ID NO: 473.

[0508] SEQ ID NO: 482 is a third amino acid sequence encoded by the sequence of

[0509] SEQ ID NO: 473.

[0510] SEQ ID NO: 483 is a fourth amino acid sequence encoded by the sequence of SEQ ID NO: 473.

[0511] SEQ ID NO: 484 is the first 30 amino acids of the M. tuberculosis antigen Ra12.

[0512] SEQ ID NO: 485 is the PCR primer AW025.

[0513] SEQ ID NO: 486 is the PCR primer AW003.

[0514] SEQ ID NO: 487 is the PCR primer AW027.

[0515] SEQ ID NO: 488 is the PCR primer AW026.

[0516] SEQ ID NO: 489-501 are peptides employed in epitope mapping studies.

[0517] SEQ ID NO: 502 is the determined cDNA sequence of the complementarity determining region for the anti-P503S monoclonal antibody 20D4.

[0518] SEQ ID NO: 503 is the determined cDNA sequence of the complementarity determining region for the anti-P503S monoclonal antibody JA1.

[0519] SEQ ID NO: 504 & 505 are peptides employed in epitope mapping studies.

[0520] SEQ ID NO: 506 is the determined cDNA sequence of the complementarity determining region for the anti-P703P monoclonal antibody 8H2.

[0521] SEQ ID NO: 507 is the determined cDNA sequence of the complementarity determining region for the anti-P703P monoclonal antibody 7H8.

[0522] SEQ ID NO: 508 is the determined cDNA sequence of the complementarity determining region for the anti-P703P monoclonal antibody 2D4.

[0523] SEQ ID NO: 509-522 are peptides employed in epitope mapping studies.

[0524] SEQ ID NO: 523 is a mature form of P703P used to raise antibodies against P703P.

[0525] SEQ ID NO: 524 is the putative full-length cDNA sequence of P703P.

[0526] SEQ ID NO: 525 is the amino acid sequence encoded by SEQ ID NO: 524.

[0527] SEQ ID NO: 526 is the full-length cDNA sequence for P790P.

[0528] SEQ ID NO: 527 is the amino acid sequence for P790P.

[0529] SEQ ID NO: 528 & 529 are PCR primers.

[0530] SEQ ID NO: 530 is the cDNA sequence of a splice variant of SEQ ID NO: 366.

[0531] SEQ ID NO: 531 is the cDNA sequence of the open reading frame of SEQ ID NO: 530.

[0532] SEQ ID NO: 532 is the predicted amino acid encoded by the sequence of

[0533] SEQ ID NO: 531.

[0534] SEQ ID NO: 533 is the DNA sequence of a putative ORF of P775P.

[0535] SEQ ID NO: 534 is the amino acid sequence encoded by SEQ ID NO: 533.

[0536] SEQ ID NO: 535 is a first full-length cDNA sequence for P510S.

[0537] SEQ ID NO: 536 is a second full-length cDNA sequence for P510S.

[0538] SEQ ID NO: 537 is the amino acid sequence encoded by SEQ ID NO: 535.

[0539] SEQ ID NO: 538 is the amino acid sequence encoded by SEQ ID NO: 536.

[0540] SEQ ID NO: 539 is the peptide P501S-370.

[0541] SEQ ID NO: 540 is the peptide P501S-376.

[0542] SEQ ID NO: 541-551 are epitopes of P501S.

[0543] SEQ ID NO: 552 is an extended cDNA sequence for P712P.

[0544] SEQ ID NO: 553-568 are the amino acid sequences encoded by predicted open reading frames within SEQ ID NO: 552.

[0545] SEQ ID NO: 569 is an extended cDNA sequence for P776P.

[0546] SEQ ID NO: 570 is the determined cDNA sequence for a splice variant of P776P referred to as contig 6.

[0547] SEQ ID NO: 571 is the determined cDNA sequence for a splice variant of P776P referred to as contig 7.

[0548] SEQ ID NO: 572 is the determined cDNA sequence for a splice variant of P776P referred to as contig 14.

[0549] SEQ ID NO: 573 is the amino acid sequence encoded by a first ORF of SEQ ID NO: 570.

[0550] SEQ ID NO: 574 is the amino acid sequence encoded by a second ORF of

[0551] SEQ ID NO: 570.

[0552] SEQ ID NO: 575 is the amino acid sequence encoded by a ORF of SEQ ID NO: 571.

[0553] SEQ ID NO: 576-586 are amino acid sequences encoded by ORFs of SEQ ID NO: 569.

[0554] SEQ ID NO: 587 is a DNA consensus sequence of the sequences of P767P and P777P.

[0555] SEQ ID NO: 588-590 are amino acid sequences encoded by predicted ORFs of SEQ ID NO: 587.

[0556] SEQ ID NO: 591 is an extended cDNA sequence for P1020C.

[0557] SEQ ID NO: 592 is the amino acid sequence encoded by the sequence of

[0558] SEQ ID NO:591.

[0559] SEQ ID NO: 593 is a splice variant of P775P referred to as 50748.

[0560] SEQ ID NO: 594 is a splice variant of P775P referred to as 50717.

[0561] SEQ ID NO: 595 is a splice variant of P775P referred to as 45985.

[0562] SEQ ID NO: 596 is a splice variant of P775P referred to as 38769.

[0563] SEQ ID NO: 597 is a splice variant of P775P referred to as 37922.

[0564] SEQ ID NO: 598 is a splice variant of P510S referred to as 49274.

[0565] SEQ ID NO: 599 is a splice variant of P510S referred to as 39487.

[0566] SEQ ID NO: 600 is a splice variant of P504S referred to as 5167.16.

[0567] SEQ ID NO: 601 is a splice variant of P504S referred to as 5167.1.

[0568] SEQ ID NO: 602 is a splice variant of P504S referred to as 5163.46.

[0569] SEQ ID NO: 603 is a splice variant of P504S referred to as 5163.42.

[0570] SEQ ID NO: 604 is a splice variant of P504S referred to as 5163.34.

[0571] SEQ ID NO: 605 is a splice variant of P504S referred to as 5163.17.

[0572] SEQ ID NO: 606 is a splice variant of P501S referred to as 10640.

[0573] SEQ ID NO: 607-615 are the sequences of PCR primers.

[0574] SEQ ID NO: 616 is the determined cDNA sequence of a fusion of P703P and PSA.

[0575] SEQ ID NO: 617 is the amino acid sequence of the fusion of P703P and PSA.

[0576] SEQ ID NO: 618-689 are determined cDNA sequences of prostate-specific clones.

[0577] SEQ ID NO: 690 is the cDNA sequence of the gene DD3.

[0578] SEQ ID NO: 691-697 are determined cDNA sequences of prostate-specific clones.

[0579] SEQ ID NO: 698 is an extended cDNA sequence for P714P.

[0580] SEQ ID NO: 699-701 are the cDNA sequences for splice variants of P704P.

[0581] SEQ ID NO: 702 is the cDNA sequence of a spliced variant of P553S referred to as P553S-14.

[0582] SEQ ID NO: 703 is the cDNA sequence of a spliced variant of P553S referred to as P553S-12.

[0583] SEQ ID NO: 704 is the cDNA sequence of a spliced variant of P553S referred to as P553S-10.

[0584] SEQ ID NO: 705 is the cDNA sequence of a spliced variant of P553S referred to as P553S-6.

[0585] SEQ ID NO: 706 is the amino acid sequence encoded by SEQ ID NO: 705.

[0586] SEQ ID NO: 707 is a first amino acid sequence encoded by SEQ ID NO: 702.

[0587] SEQ ID NO: 708 is a second amino acid sequence encoded by SEQ ID NO: 702.

[0588] SEQ ID NO: 709-772 are determined cDNA sequences of prostate-specific clones.

[0589] SEQ ID NO: 773 is a first full-length cDNA sequence for prostate-specific transglutaminase gene (also referred to herein as P558S).

[0590] SEQ ID NO: 774 is a second full-length cDNA sequence for prostate-specific transglutaminase gene.

[0591] SEQ ID NO: 775 is the amino acid sequence encoded by the sequence of

[0592] SEQ ID NO: 773.

[0593] SEQ ID NO: 776 is the amino acid sequence encoded by the sequence of

[0594] SEQ ID NO: 774.

[0595] SEQ ID NO: 777 is the full-length cDNA sequence for P788P.

[0596] SEQ ID NO: 778 is the amino acid sequence encoded by SEQ ID NO: 777.

[0597] SEQ ID NO: 779 is the determined cDNA sequence for a polymorphic variant of P788P.

[0598] SEQ ID NO: 780 is the amino acid sequence encoded by SEQ ID NO: 779.

[0599] SEQ ID NO: 781 is the amino acid sequence of peptide 4 from P703P.

[0600] SEQ ID NO: 782 is the cDNA sequence that encodes peptide 4 from P703P.

[0601] SEQ ID NO: 783-798 are the cDNA sequence encoding epitopes of P703P.

[0602] SEQ ID NO: 799-814 are the amino acid sequences of epitopes of P703P.

[0603] SEQ ID NO: 815 and 816 are PCR primers.

[0604] SEQ ID NO: 817 is the cDNA sequence encoding an N-terminal portion of P788P expressed in E. coli.

[0605] SEQ ID NO: 818 is the amino acid sequence of the N-terminal portion of P788P expressed in E. coli.

[0606] SEQ ID NO: 819 is the amino acid sequence of the M. tuberculosis antigen Ra12.

[0607] SEQ ID NO: 820 and 821 are PCR primers.

[0608] SEQ ID NO: 822 is the cDNA sequence for the Ra12-P510S-C construct.

[0609] SEQ ID NO: 823 is the cDNA sequence for the P510S-C construct.

[0610] SEQ ID NO: 824 is the cDNA sequence for the P510S-E3 construct.

[0611] SEQ ID NO: 825 is the amino acid sequence for the Ra12-P510S-C construct.

[0612] SEQ ID NO: 826 is the amino acid sequence for the P510S-C construct.

[0613] SEQ ID NO: 827 is the amino acid sequence for the P510S-E3 construct.

[0614] SEQ ID NO: 828-833 are PCR primers.

[0615] SEQ ID NO: 834 is the cDNA sequence of the construct Ra12-P775P-ORF3.

[0616] SEQ ID NO: 835 is the amino acid sequence of the construct Ra12-P775P-ORF3.

[0617] SEQ ID NO: 836 and 837 are PCR primers.

[0618] SEQ ID NO: 838 is the determined amino acid sequence for a P703P His tag fusion protein.

[0619] SEQ ID NO: 839 is the determined cDNA sequence for a P703P His tag fusion protein.

[0620] SEQ ID NO: 840 and 841 are PCR primers.

[0621] SEQ ID NO: 842 is the determined amino acid sequence for a P705P His tag fusion protein.

[0622] SEQ ID NO: 843 is the determined cDNA sequence for a P705P His tag fusion protein.

[0623] SEQ ID NO: 844 and 845 are PCR primers.

[0624] SEQ ID NO: 846 is the determined amino acid sequence for a P711P His tag fusion protein.

[0625] SEQ ID NO: 847 is the determined cDNA sequence for a P711P His tag fusion protein.

[0626] SEQ ID NO: 848 is the amino acid sequence of the M. tuberculosis antigen Ra12.

[0627] SEQ ID NO: 849 and 850 are PCR primers.

[0628] SEQ ID NO: 851 is the determined cDNA sequence for the construct Ra12-P501S-E2.

[0629] SEQ ID NO: 852 is the determined amino acid sequence for the construct Ra12-P501S-E2.

[0630] SEQ ID NO: 853 is the amino acid sequence for an epitope of P501S.

[0631] SEQ ID NO: 854 is the DNA sequence encoding SEQ ID NO: 853.

[0632] SEQ ID NO: 855 is the amino acid sequence for an epitope of P501S.

[0633] SEQ ID NO: 856 is the DNA sequence encoding SEQ ID NO: 855.

[0634] SEQ ID NO: 857 is a peptide employed in epitope mapping studies.

[0635] SEQ ID NO: 858 is the amino acid sequence for an epitope of P501S.

[0636] SEQ ID NO: 859 is the DNA sequence encoding SEQ ID NO: 858.

[0637] SEQ ID NO: 860-862 are the amino acid sequences for CD4 epitopes of P501S.

[0638] SEQ ID NO: 863-865 are the DNA sequences encoding the sequences of

[0639] SEQ ID NO: 860-862.

[0640] SEQ ID NO: 866-877 are the amino acid sequences for putative CTL epitopes of P703P.

[0641] SEQ ID NO: 878 is the full-length cDNA sequence for P789P.

[0642] SEQ ID NO: 879 is the amino acid sequence encoded by SEQ ID NO: 878.

[0643] SEQ ID NO: 880 is the determined full-length cDNA sequence for the splice variant of P776P referred to as contig 6.

[0644] SEQ ID NO: 881-882 are determined full-length cDNA sequences for the splice variant of P776P referred to as contig 7.

[0645] SEQ ID NO: 883-887 are amino acid sequences encoded by SEQ ID NO: 880.

[0646] SEQ ID NO: 888-893 are amino acid sequences encoded by the splice variant of P776P referred to as contig 7.

[0647] SEQ ID NO: 894 is the full-length cDNA sequence for human transmembrane protease serine 2.

[0648] SEQ ID NO: 895 is the amino acid sequence encoded by SEQ ID NO: 894.

[0649] SEQ ID NO: 896 is the cDNA sequence encoding the first 209 amino acids of human transmembrane protease serine 2.

[0650] SEQ ID NO: 897 is the first 209 amino acids of human transmembrane protease serine 2.

[0651] SEQ ID NO: 898 is the amino acid sequence of peptide 296-322 of P501S.

[0652] SEQ ID NO: 899-902 are PCR primers.

[0653] SEQ ID NO: 903 is the determined cDNA sequence of the Vb chain of a T cell receptor for the P501S-specific T cell clone 4E5.

[0654] SEQ ID NO: 904 is the determined cDNA sequence of the Va chain of a T cell receptor for the P501S-specific T cell clone 4E5.

[0655] SEQ ID NO: 905 is the amino acid sequence encoded by SEQ ID NO 903.

[0656] SEQ ID NO: 906 is the amino acid sequence encoded by SEQ ID NO 904.

[0657] SEQ ID NO: 907 is the full-length open reading frame for P768P including stop codon.

[0658] SEQ ID NO: 908 is the full-length open reading frame for P768P without stop codon.

[0659] SEQ ID NO: 909 is the amino acid sequence encoded by SEQ ID NO: 908.

[0660] SEQ ID NO: 910-915 are the amino acid sequences for predicted domains of P768P.

[0661] SEQ ID NO: 916 is the full-length cDNA sequence of P835P.

[0662] SEQ ID NO: 917 is the cDNA sequence of the previously identified clone FLJ13581.

[0663] SEQ ID NO: 918 is the cDNA sequence of the open reading frame for P835P with stop codon.

[0664] SEQ ID NO: 919 is the cDNA sequence of the open reading frame for P835P without stop codon.

[0665] SEQ ID NO: 920 is the full-length amino acid sequence for P835P.

[0666] SEQ ID NO: 921-928 are the amino acid sequences of extracellular and intracellular domains of P835P.

[0667] SEQ ID NO: 929 is the full-length cDNA sequence for P1000C.

[0668] SEQ ID NO: 930 is the cDNA sequence of the open reading frame for P1000C, including stop codon.

[0669] SEQ ID NO: 931 is the cDNA sequence of the open reading frame for P1000C, without stop codon.

[0670] SEQ ID NO: 932 is the full-length amino acid sequence for P1000C.

[0671] SEQ ID NO: 933 is amino acids 1-100 of SEQ ID NO: 932.

[0672] SEQ ID NO: 934 is amino acids 100-492 of SEQ ID NO: 932.

[0673] SEQ ID NO: 935-937 are PCR primers.

[0674] SEQ ID NO: 938 is the cDNA sequence of the expressed full-length P767P coding region.

[0675] SEQ ID NO: 939 is the cDNA sequence of an expressed truncated P767P coding region.

[0676] SEQ ID NO: 940 is the amino acid sequence encoded by SEQ ID NO: 939.

[0677] SEQ ID NO: 941 is the amino acid sequence encoded by SEQ ID NO: 938.

[0678] SEQ ID NO: 942 is the DNA sequence of a CD4 epitope of P703P.

[0679] SEQ ID NO: 943 is the amino acid sequence of a CD4 epitope of P703P.

[0680] SEQ ID NO: 944 is the amino acid sequence of PSMA.

[0681] SEQ ID NO: 945 is the amino acid sequence of PAP.

[0682] SEQ ID NO: 946 is the amino acid sequence of PSA.

[0683] SEQ ID NO: 947 is the amino acid sequence of a fusion protein comprising PSA, P703P and P501S.

[0684] SEQ ID NO: 948-972 are the amino acid sequences of epitopes of PSA.

[0685] SEQ ID NO: 973 is the amino acid sequence of a fusion between NS1, the mature form of P703P and PSA epitopes.

[0686] SEQ ID NO: 974 is the amino acid sequence of a fusion between a portion of P501S and PSA epitopes.

[0687] SEQ ID NO: 975 and 976 are PCR primers.

[0688] SEQ ID NO: 977 is the cDNA sequence of the fusion construct RaFOPP.

[0689] SEQ ID NO: 978 is the amino acid sequence of the fusion construct RaFOPP.

[0690] SEQ ID NO: 979 is the cDNA sequence of the fusion construct FOPP2.

[0691] SEQ ID NO: 980 is the cDNA sequence of the fusion construct FOP3.

[0692] SEQ ID NO: 981 is the amino acid sequence of the fusion construct FOPP2.

[0693] SEQ ID NO: 982 is the amino acid sequence of the fusion construct FOP3.

### DETAILED DESCRIPTION OF THE INVENTION

[0694] The present invention is directed generally to compositions and their use in the therapy and diagnosis of cancer, particularly prostate cancer. As described further below, illustrative compositions of the present invention include, but are not restricted to, polypeptides, particularly immunogenic polypeptides, fusion proteins comprising such polypeptides, polynucleotides encoding such polypeptides and fusion proteins, antibodies and other binding agents, antigen presenting cells (APCs) and immune system cells (e.g., T cells).

[0695] The practice of the present invention will employ, unless indicated specifically to the contrary, conventional methods of virology, immunology, microbiology, molecular biology and recombinant DNA techniques within the skill of the art, many of which are described below for the purpose of illustration. Such techniques are explained fully in the literature. See, e.g., Sambrook, et al. Molecular Cloning: A Laboratory Manual (2nd Edition, 1989); Maniatis et al. Molecular Cloning: A Laboratory Manual (1982); DNA Cloning: A Practical Approach, vol. I & II (D. Glover, ed.); Oligonucleotide Synthesis (N. Gait, ed., 1984); Nucleic Acid Hybridization (B. Hames & S. Higgins, eds., 1985); Transcription and Translation (B. Hames & S. Higgins, eds., 1984); Animal Cell Culture (R. Freshney, ed., 1986); Perbal, A Practical Guide to Molecular Cloning (1984).

[0696] All publications, patents and patent applications cited herein, whether supra or infra, are hereby incorporated by reference in their entirety.

[0697] As used in this specification and the appended claims, the singular forms “a,” “an” and “the” include plural references unless the content clearly dictates otherwise.

[0698] Polypeptide Compositions

[0699] As used herein, the term “polypeptide” “is used in its conventional meaning, i.e., as a sequence of amino acids. The polypeptides are not limited to a specific length of the product; thus, peptides, oligopeptides, and proteins are included within the definition of polypeptide, and such terms may be used interchangeably herein unless specifically indicated otherwise. This term also does not refer to or exclude post-expression modifications of the polypeptide, for example, glycosylations, acetylations, phosphorylations and the like, as well as other modifications known in the art, both naturally occurring and non-naturally occurring. A polypeptide may be an entire protein, or a subsequence thereof. Particular polypeptides of interest in the context of this invention are amino acid subsequences comprising epitopes, i.e., antigenic determinants substantially responsible for the immunogenic properties of a polypeptide and being capable of evoking an immune response.

[0700] Particularly illustrative polypeptides of the present invention comprise those encoded by a polynucleotide sequence set forth in any one of SEQ ID NOs: 1-111, 115-171, 173-175, 177, 179-305, 307-315, 326, 328, 330, 332-335, 340-375, 381, 382, 384-476, 524, 526, 530, 531, 533, 535, 536, 552, 569-572, 587, 591, 593-606, 618-705, 709-774, 777, 789, 817, 823, 824, 878, 880-882, 894, 896, 907, 908, 916-919, 929-931, 938, 939 and 942, or a sequence that hybridizes under moderately stringent conditions, or, alternatively, under highly stringent conditions, to a polynucleotide sequence set forth in any one of SEQ ID NOs: 1-111, 115-171, 173-175, 177, 179-305, 307-315, 326, 328, 330, 332-335, 340-375, 381, 382, 384-476, 524, 526, 530, 531, 533, 535, 536, 552, 569-572, 587, 591, 593-606, 618-705, 709-774, 777, 789, 817, 823, 824, 878, 880-882, 894, 896, 907, 908, 916-919, 929-931, 938, 939 and 942. In specific embodiments, the polypeptides of the invention comprise amino acid sequences as set forth in any one of SEQ ID NO: 112-114, 172, 176, 178, 327, 329, 331, 336, 339, 376-380, 383, 477-483, 496, 504, 505, 519, 520, 522, 525, 527, 532, 534, 537-551, 553-568, 573-586, 588-590, 592, 706-708, 775, 776, 778, 780, 781, 811, 814, 818, 826, 827, 853, 855, 858, 860-862, 866-877, 879, 883-893, 895, 897, 898, 909-915, 920-928, 932-934, 940, 941 and 943.

[0701] The polypeptides of the present invention are sometimes herein referred to as prostate-specific proteins or prostate-specific polypeptides, as an indication that their identification has been based at least in part upon their increased levels of expression in prostate tissue samples. Thus, a “prostate-specific polypeptide” or “prostate-specific protein,” refers generally to a polypeptide sequence of the present invention, or a polynucleotide sequence encoding such a polypeptide, that is expressed in a substantial proportion of prostate tissue samples, for example preferably greater than about 20%, more preferably greater than about 30%, and most preferably greater than about 50% or more of prostate tissue samples tested, at a level that is at least two fold, and preferably at least five fold, greater than the level of expression in other normal tissues, as determined using a representative assay provided herein. A prostate-specific polypeptide sequence of the invention, based upon its increased level of expression in tumor cells, has particular utility both as a diagnostic marker as well as a therapeutic target, as further described below.

[0702] In certain preferred embodiments, the polypeptides of the invention are immunogenic, i.e., they react detectably within an immunoassay (such as an ELISA or T-cell stimulation assay) with antisera and/or T-cells from a patient with prostate cancer. Screening for immunogenic activity can be performed using techniques well known to the skilled artisan. For example, such screens can be performed using methods such as those described in Harlow and Lane, Antibodies: A Laboratory Manual, Cold Spring Harbor Laboratory, 1988. In one illustrative example, a polypeptide may be immobilized on a solid support and contacted with patient sera to allow binding of antibodies within the sera to the immobilized polypeptide. Unbound sera may then be removed and bound antibodies detected using, for example, ¹²⁵I-labeled Protein A.

[0703] As would be recognized by the skilled artisan, immunogenic portions of the polypeptides disclosed herein are also encompassed by the present invention. An “immunogenic portion,” as used herein, is a fragment of an immunogenic polypeptide of the invention that itself is immunologically reactive (i.e., specifically binds) with the B-cells and/or T-cell surface antigen receptors that recognize the polypeptide. Immunogenic portions may generally be identified using well known techniques, such as those summarized in Paul, Fundamental Immunology, 3rd ed., 243-247 (Raven Press, 1993) and references cited therein. Such techniques include screening polypeptides for the ability to react with antigen-specific antibodies, antisera and/or T-cell lines or clones. As used herein, antisera and antibodies are “antigen-specific” if they specifically bind to an antigen (i.e., they react with the protein in an ELISA or other immunoassay, and do not react detectably with unrelated proteins). Such antisera and antibodies may be prepared as described herein, and using well-known techniques.

[0704] In one preferred embodiment, an immunogenic portion of a polypeptide of the present invention is a portion that reacts with antisera and/or T-cells at a level that is not substantially less than the reactivity of the full-length polypeptide (e.g., in an ELISA and/or T-cell reactivity assay). Preferably, the level of immunogenic activity of the immunogenic portion is at least about 50%, preferably at least about 70% and most preferably greater than about 90% of the immunogenicity for the full-length polypeptide. In some instances, preferred immunogenic portions will be identified that have a level of immunogenic activity greater than that of the corresponding full-length polypeptide, e.g., having greater than about 100% or 150% or more immunogenic activity.

[0705] In certain other embodiments, illustrative immunogenic portions may include peptides in which an N-terminal leader sequence and/or transmembrane domain has been deleted. Other illustrative immunogenic portions will contain a small N- and/or C-terminal deletion (e.g., 1-30 amino acids, preferably 5-15 amino acids), relative to the mature protein.

[0706] In another embodiment, a polypeptide composition of the invention may also comprise one or more polypeptides that are immunologically reactive with T cells and/or antibodies generated against a polypeptide of the invention, particularly a polypeptide having an amino acid sequence disclosed herein, or to an immunogenic fragment or variant thereof.

[0707] In another embodiment of the invention, polypeptides are provided that comprise one or more polypeptides that are capable of eliciting T cells and/or antibodies that are immunologically reactive with one or more polypeptides described herein, or one or more polypeptides encoded by contiguous nucleic acid sequences contained in the polynucleotide sequences disclosed herein, or immunogenic fragments or variants thereof, or to one or more nucleic acid sequences which hybridize to one or more of these sequences under conditions of moderate to high stringency.

[0708] The present invention, in another aspect, provides polypeptide fragments comprising at least about 5, 10, 15, 20, 25, 50, or 100 contiguous amino acids, or more, including all intermediate lengths, of a polypeptide composition set forth herein, such as those set forth in SEQ ID NO: 112-114, 172, 176, 178, 327, 329, 331, 336, 339, 376-380, 383, 477-483, 496, 504, 505, 519, 520, 522, 525, 527, 532, 534, 537-551, 553-568, 573-586, 588-590, 592, 706-708, 775, 776, 778, 780, 781, 811, 814, 818, 826, 827, 853, 855, 858, 860-862, 866-877, 879, 883-893, 895, 897, 898, 909-915, 920-928, 932-934, 940, 941 and 943, or those encoded by a polynucleotide sequence set forth in a sequence of SEQ ID NO: 1-111, 115-171, 173-175, 177, 179-305, 307-315, 326, 328, 330, 332-335, 340-375, 381, 382, 384-476, 524, 526, 530, 531, 533, 535, 536, 552, 569-572, 587, 591, 593-606, 618-705, 709-774, 777, 789, 817, 823, 824, 878, 880-882, 894, 896, 907, 908, 916-919, 929-931, 938, 939 and 942.

[0709] In another aspect, the present invention provides variants of the polypeptide compositions described herein. Polypeptide variants generally encompassed by the present invention will typically exhibit at least about 70%, 75%, 80%, 85%, 90%, 91%, 92%, 93%, 94%, 95%, 96%, 97%, 98%, or 99% or more identity (determined as described below), along its length, to a polypeptide sequence set forth herein.

[0710] In one preferred embodiment, the polypeptide fragments and variants provided by the present invention are immunologically reactive with an antibody and/or T-cell that reacts with a full-length polypeptide specifically set forth herein.

[0711] In another preferred embodiment, the polypeptide fragments and variants provided by the present invention exhibit a level of immunogenic activity of at least about 50%, preferably at least about 70%, and most preferably at least about 90% or more of that exhibited by a full-length polypeptide sequence specifically set forth herein.

[0712] A polypeptide “variant,” as the term is used herein, is a polypeptide that typically differs from a polypeptide specifically disclosed herein in one or more substitutions, deletions, additions and/or insertions. Such variants may be naturally occurring or may be synthetically generated, for example, by modifying one or more of the above polypeptide sequences of the invention and evaluating their immunogenic activity as described herein using any of a number of techniques well known in the art.

[0713] For example, certain illustrative variants of the polypeptides of the invention include those in which one or more portions, such as an N-terminal leader sequence or transmembrane domain, have been removed. Other illustrative variants include variants in which a small portion (e.g., 1-30 amino acids, preferably 5-15 amino acids) has been removed from the N- and/or C-terminal of the mature protein.

[0714] In many instances, a variant will contain conservative substitutions. A “conservative substitution” is one in which an amino acid is substituted for another amino acid that has similar properties, such that one skilled in the art of peptide chemistry would expect the secondary structure and hydropathic nature of the polypeptide to be substantially unchanged. As described above, modifications may be made in the structure of the polynucleotides and polypeptides of the present invention and still obtain a functional molecule that encodes a variant or derivative polypeptide with desirable characteristics, e.g., with immunogenic characteristics. When it is desired to alter the amino acid sequence of a polypeptide to create an equivalent, or even an improved, immunogenic variant or portion of a polypeptide of the invention, one skilled in the art will typically change one or more of the codons of the encoding DNA sequence according to Table 1.

[0715] For example, certain amino acids may be substituted for other amino acids in a protein structure without appreciable loss of interactive binding capacity with structures such as, for example, antigen-binding regions of antibodies or binding sites on substrate molecules. Since it is the interactive capacity and nature of a protein that defines that protein's biological functional activity, certain amino acid sequence substitutions can be made in a protein sequence, and, of course, its underlying DNA coding sequence, and nevertheless obtain a protein with like properties. It is thus contemplated that various changes may be made in the peptide sequences of the disclosed compositions, or corresponding DNA sequences which encode said peptides without appreciable loss of their biological utility or activity.

TABLE 1

| Amino Acids | | Codons | | | | | | |
|---|---|---|---|---|---|---|---|---|
| Alanine | Ala | A | GCA | GCC | GCG | GCU | | |
| Cysteine | Cys | C | UGC | UGU | | | | |
| Aspartic acid | Asp | D | GAC | GAU | | | | |
| Glutamic acid | Glu | E | GAA | GAG | | | | |
| Phenylalanine | Phe | F | UUC | UUU | | | | |
| Glycine | Gly | G | GGA | GGC | GGG | GGU | | |
| Histidine | His | H | CAC | CAU | | | | |
| Isoleucine | Ile | I | AUA | AUC | AUU | | | |
| Lysine | Lys | K | AAA | AAG | | | | |
| Leucine | Leu | L | UUA | UUG | CUA | CUC | CUG | CUU |
| Methionine | Met | M | AUG | | | | | |
| Asparagine | Asn | N | AAC | AAU | | | | |
| Proline | Pro | P | CCA | CCC | CCG | CCU | | |
| Glutamine | Gln | Q | CAA | CAG | | | | |
| Arginine | Arg | R | AGA | AGG | CGA | CGC | CGG | CGU |
| Serine | Ser | S | AGC | AGU | UCA | UCC | UCG | UCU |
| Threonine | Thr | T | ACA | ACC | ACG | ACU | | |
| Valine | Val | V | GUA | GUC | GUG | GUU | | |
| Tryptophan | Trp | W | UGG | | | | | |
| Tyrosine | Tyr | Y | UAC | UAU | | | | |

[0716] In making such changes, the hydropathic index of amino acids may be considered. The importance of the hydropathic amino acid index in conferring interactive biologic function on a protein is generally understood in the art (Kyte and Doolittle, 1982, incorporated herein by reference). It is accepted that the relative hydropathic character of the amino acid contributes to the secondary structure of the resultant protein, which in turn defines the interaction of the protein with other molecules, for example, enzymes, substrates, receptors, DNA, antibodies, antigens, and the like. Each amino acid has been assigned a hydropathic index on the basis of its hydrophobicity and charge characteristics (Kyte and Doolittle, 1982). These values are: isoleucine (+4.5); valine (+4.2); leucine (+3.8); phenylalanine (+2.8); cysteine/cystine (+2.5); methionine (+1.9); alanine (+1.8); glycine (−0.4); threonine (−0.7); serine (−0.8); tryptophan (−0.9); tyrosine (−1.3); proline (−1.6); histidine (−3.2); glutamate (−3.5); glutamine (−3.5); aspartate (−3.5); asparagine (−3.5); lysine (−3.9); and arginine (−4.5).

[0717] It is known in the art that certain amino acids may be substituted by other amino acids having a similar hydropathic index or score and still result in a protein with similar biological activity, i.e. still obtain a biological functionally equivalent protein. In making such changes, the substitution of amino acids whose hydropathic indices are within ±2 is preferred, those within ±1 are particularly preferred, and those within ±0.5 are even more particularly preferred. It is also understood in the art that the substitution of like amino acids can be made effectively on the basis of hydrophilicity. U.S. Pat. No. 4,554,101 (specifically incorporated herein by reference in its entirety), states that the greatest local average hydrophilicity of a protein, as governed by the hydrophilicity of its adjacent amino acids, correlates with a biological property of the protein.

[0718] As detailed in U.S. Pat. No. 4,554,101, the following hydrophilicity values have been assigned to amino acid residues: arginine (+3.0); lysine (+3.0); aspartate (+3.0±1); glutamate (+3.0±1); serine (+0.3); asparagine (+0.2); glutamine (+0.2); glycine (0); threonine (−0.4); proline (−0.5±1); alanine (−0.5); histidine (−0.5); cysteine (−1.0); methionine (−1.3); valine (−1.5); leucine (−1.8); isoleucine (−1.8); tyrosine (−2.3); phenylalanine (−2.5); tryptophan (−3.4). It is understood that an amino acid can be substituted for another having a similar hydrophilicity value and still obtain a biologically equivalent, and in particular, an immunologically equivalent protein. In such changes, the substitution of amino acids whose hydrophilicity values are within ±2 is preferred, those within ±1 are particularly preferred, and those within ±0.5 are even more particularly preferred.

[0719] As outlined above, amino acid substitutions are generally therefore based on the relative similarity of the amino acid side-chain substituents, for example, their hydrophobicity, hydrophilicity, charge, size, and the like. Exemplary substitutions that take various of the foregoing characteristics into consideration are well known to those of skill in the art and include: arginine and lysine; glutamate and aspartate; serine and threonine; glutamine and asparagine; and valine, leucine and isoleucine.

[0720] In addition, any polynucleotide may be further modified to increase stability in vivo. Possible modifications include, but are not limited to, the addition of flanking sequences at the 5′ and/or 3′ ends; the use of phosphorothioate or 2′ O-methyl rather than phosphodiesterase linkages in the backbone; and/or the inclusion of nontraditional bases such as inosine, queosine and wybutosine, as well as acetyl- methyl-, thio- and other modified forms of adenine, cytidine, guanine, thymine and uridine.

[0721] Amino acid substitutions may further be made on the basis of similarity in polarity, charge, solubility, hydrophobicity, hydrophilicity and/or the amphipathic nature of the residues. For example, negatively charged amino acids include aspartic acid and glutamic acid; positively charged amino acids include lysine and arginine; and amino acids with uncharged polar head groups having similar hydrophilicity values include leucine, isoleucine and valine; glycine and alanine; asparagine and glutamine; and serine, threonine, phenylalanine and tyrosine. Other groups of amino acids that may represent conservative changes include: (1) ala, pro, gly, glu, asp, gln, asn, ser, thr; (2) cys, ser, tyr, thr; (3) val, ile, leu, met, ala, phe; (4) lys, arg, his; and (5) phe, tyr, trp, his. A variant may also, or alternatively, contain nonconservative changes. In a preferred embodiment, variant polypeptides differ from a native sequence by substitution, deletion or addition of five amino acids or fewer. Variants may also (or alternatively) be modified by, for example, the deletion or addition of amino acids that have minimal influence on the immunogenicity, secondary structure and hydropathic nature of the polypeptide.

[0722] As noted above, polypeptides may comprise a signal (or leader) sequence at the N-terminal end of the protein, which co-translationally or post-translationally directs transfer of the protein. The polypeptide may also be conjugated to a linker or other sequence for ease of synthesis, purification or identification of the polypeptide (e.g., poly-His), or to enhance binding of the polypeptide to a solid support. For example, a polypeptide may be conjugated to an immunoglobulin Fc region.

[0723] When comparing polypeptide sequences, two sequences are said to be “identical” if the sequence of amino acids in the two sequences is the same when aligned for maximum correspondence, as described below. Comparisons between two sequences are typically performed by comparing the sequences over a comparison window to identify and compare local regions of sequence similarity. A “comparison window” as used herein, refers to a segment of at least about 20 contiguous positions, usually 30 to about 75, 40 to about 50, in which a sequence may be compared to a reference sequence of the same number of contiguous positions after the two sequences are optimally aligned.

[0724] Optimal alignment of sequences for comparison may be conducted using the Megalign program in the Lasergene suite of bioinformatics software (DNASTAR, Inc., Madison, Wis.), using default parameters. This program embodies several alignment schemes described in the following references: Dayhoff, M. O. (1978) A model of evolutionary change in proteins—Matrices for detecting distant relationships. In Dayhoff, M. O. (ed.) Atlas of Protein Sequence and Structure, National Biomedical Research Foundation, Washington DC Vol. 5, Suppl. 3, pp. 345-358; Hein J. (1990) Unified Approach to Alignment and Phylogenes pp. 626-645 Methods in Enzymology vol. 183, Academic Press, Inc., San Diego, Calif.; Higgins, D. G. and Sharp, P. M. (1989) CABIOS 5:151-153; Myers, E. W. and Muller W. (1988) CABIOS 4:11-17; Robinson, E. D. (1971) Comb. Theor 11:105; Santou, N. Nes, M. (1987) Mol. Biol. Evol. 4:406-425; Sneath, P. H. A. and Sokal, R. R. (1973) Numerical Taxonomy—the Principles and Practice of Numerical Taxonomy, Freeman Press, San Francisco, Calif.; Wilbur, W. J. and Lipman, D. J. (1983) Proc. Natl. Acad., Sci. USA 80:726-730.

[0725] Alternatively, optimal alignment of sequences for comparison may be conducted by the local identity algorithm of Smith and Waterman (1981) Add. APL. Math 2:482, by the identity alignment algorithm of Needleman and Wunsch (1970) J. Mol. Biol. 48:443, by the search for similarity methods of Pearson and Lipman (1988) Proc. Natl. Acad. Sci. USA 85: 2444, by computerized implementations of these algorithms (GAP, BESTFIT, BLAST, FASTA, and TFASTA in the Wisconsin Genetics Software Package, Genetics Computer Group (GCG), 575 Science Dr., Madison, Wis.), or by inspection.

[0726] One preferred example of algorithms that are suitable for determining percent sequence identity and sequence similarity are the BLAST and BLAST 2.0 algorithms, which are described in Altschul et al. (1977) Nucl. Acids Res. 25:3389-3402 and Altschul et al. (1990) J. Mol. Biol. 215:403-410, respectively. BLAST and BLAST 2.0 can be used, for example with the parameters described herein, to determine percent sequence identity for the polynucleotides and polypeptides of the invention. Software for performing BLAST analyses is publicly available through the National Center for Biotechnology Information. For amino acid sequences, a scoring matrix can be used to calculate the cumulative score. Extension of the word hits in each direction are halted when: the cumulative alignment score falls off by the quantity X from its maximum achieved value; the cumulative score goes to zero or below, due to the accumulation of one or more negative-scoring residue alignments; or the end of either sequence is reached. The BLAST algorithm parameters W, T and X determine the sensitivity and speed of the alignment.

[0727] In one preferred approach, the “percentage of sequence identity” is determined by comparing two optimally aligned sequences over a window of comparison of at least 20 positions, wherein the portion of the polypeptide sequence in the comparison window may comprise additions or deletions (i.e., gaps) of 20 percent or less, usually 5 to 15 percent, or 10 to 12 percent, as compared to the reference sequences (which does not comprise additions or deletions) for optimal alignment of the two sequences. The percentage is calculated by determining the number of positions at which the identical amino acid residue occurs in both sequences to yield the number of matched positions, dividing the number of matched positions by the total number of positions in the reference sequence (ie., the window size) and multiplying the results by 100 to yield the percentage of sequence identity.

[0728] Within other illustrative embodiments, a polypeptide may be a fusion polypeptide that comprises multiple polypeptides as described herein, or that comprises at least one polypeptide as described herein and an unrelated sequence, such as a known tumor protein. A fusion partner may, for example, assist in providing T helper epitopes (an immunological fusion partner), preferably T helper epitopes recognized by humans, or may assist in expressing the protein (an expression enhancer) at higher yields than the native recombinant protein. Certain preferred fusion partners are both immunological and expression enhancing fusion partners. Other fusion partners may be selected so as to increase the solubility of the polypeptide or to enable the polypeptide to be targeted to desired intracellular compartments. Still further fusion partners include affinity tags, which facilitate purification of the polypeptide.

[0729] In certain embodiments, the present invention provides fusion proteins comprising a polypeptide disclosed herein together with at least one of the following known prostate antigens: prostate specific antigen (PSA); prostatic acid phosphatase (PAP); and prostate specific membrane antigen (PSMA), or an epitope thereof. The protein sequences for PSMA, PAP and PSA are provided in SEQ ID NO: 944-946, respectively.

[0730] In certain embodiments, the fusion proteins of the present invention comprise PSA, PAP and/or PSMA, or an epitope thereof, in combination with one or more of the following the inventive antigens: P501S (amino acid sequence provided in SEQ ID NO: 113); P703P (amino acid sequences provided in SEQ ID NO: 172, 176, 178, 327, 329, 331 and 525); P775P (amino acid sequences provided in SEQ ID NO: 477-483 and 534); P776P (amino acid sequences provided in SEQ ID NO: 573-586 and 883-893); P790P (amino acid sequence provided in SEQ ID NO: 527); P510S (amino acid sequences provided in SEQ ID NO: 537 and 538); P711P (amino acid sequence provided in SEQ ID NO: 383); P788P (amino acid sequence provided in SEQ ID NO: 778); and P1020C (amino acid sequence provided in SEQ ID NO: 592). In certain preferred embodiments, the inventive fusion proteins comprise one of the following combinations of antigens: PSA and P703P; PSA and P501S; PAP and P703P; PAP and P501S; PSMA and P703P; PSMA and P501S; PSA, PAP and P703P; PSA, PAP and P501S; PSA, PAP, PSMA and P703P, PSA, PAP, PSMA and P501S. The amino acid sequence of a fusion protein of PSA, P703P and P501S is provided in SEQ ID NO: 947. The cDNA sequences of fusion proteins of P703P with PSA (referred to as FOPP), P703P with PAP (referred to as FOPP2), and P703P with both PSA and PAP (referred to as FOP3), prepared as described below in Example 21, are provided in SEQ ID NO: 616, 979 and 980, respectively, with the corresponding amino acid sequences being provided in SEQ ID NO: 617, 981 and 982.

[0731] In certain aspects, the present invention provides fusion polypeptides comprising a T cell or B cell epitope of a known prostate antigen, together with a polypeptide of the present invention or an epitope of such a polypeptide. The sequences of predicted HLA-A0201 epitopes of PSA are provided in SEQ ID NO: 948-954, with predicted HLA-A68.1 epitopes being provided in SEQ ID NO: 955-961, and a predicted HLA-AL epitope being provided in SEQ ID NO: 962. The sequences of previously identified T cell epitopes and B cell epitopes of PSA are provided in SEQ ID NO: 963-966 and 967-972, respectively. A series of these epitopes may be joined together and linked to a polypeptide of the present invention, or an epitope thereof, using techniques well known to those of skill in the art. The amino acid sequence of a representative fusion protein comprising the N-terminal portion of NS1 (a non-structural protein from influenzae virus), multiple epitopes of PSA and the mature form of P703P is provided in SEQ ID NO: 973, wherein residues 1-83 represent the NS1 N-terminal portion, residues 84-95, 99-108 and 114-122 represent epitopes of PSA, and residues 123 to the end of the sequence represent the mature form of P703P. The amino acid sequence of a representative fusion between a portion of P501S and epitopes of PSA is provided in SEQ ID NO: 974, wherein residues 101-109, 176-184, 275-293 and 321-359 represent T cell epitopes of PSA, and residues 299-320 represent a B cell epitope of P501S. The PSA epitopes included in such fusion proteins may be processed and presented to MHC molecules or, alternatively, the fusion protein may mount an antibody response that cross-reacts with native PSA in addition to the response mounted against the polypeptide of the present invention.

[0732] One of skill in the art will appreciate that the order of polypeptides within a fusion protein can be altered without substantially changing the therapeutic, prophylactic or diagnostic properties of the fusion protein. The fusion proteins described above are more immunogenic and will be effective in a greater number of prostate cancer patients than any of the individual components alone. The use of multiple antigens in the form of a fusion protein also lessens the likelihood of immunologic escape.

[0733] Fusion polypeptides may generally be prepared using standard techniques, including chemical conjugation. Preferably, a fusion polypeptide is expressed as a recombinant polypeptide, allowing the production of increased levels, relative to a non-fused polypeptide, in an expression system. Briefly, DNA sequences encoding the polypeptide components may be assembled separately, and ligated into an appropriate expression vector. The 3′ end of the DNA sequence encoding one polypeptide component is ligated, with or without a peptide linker, to the 5′ end of a DNA sequence encoding the second polypeptide component so that the reading frames of the sequences are in phase. This permits translation into a single fusion polypeptide that retains the biological activity of both component polypeptides.

[0734] A peptide linker sequence may be employed to separate the first and second polypeptide components by a distance sufficient to ensure that each polypeptide folds into its secondary and tertiary structures. Such a peptide linker sequence is incorporated into the fusion polypeptide using standard techniques well known in the art. Suitable peptide linker sequences may be chosen based on the following factors: (1) their ability to adopt a flexible extended conformation; (2) their inability to adopt a secondary structure that could interact with functional epitopes on the first and second polypeptides; and (3) the lack of hydrophobic or charged residues that might react with the polypeptide functional epitopes. Preferred peptide linker sequences contain Gly, Asn and Ser residues. Other near neutral amino acids, such as Thr and Ala may also be used in the linker sequence. Amino acid sequences which may be usefully employed as linkers include those disclosed in Maratea et al., Gene 40:39-46, 1985; Murphy et al., Proc. Natl. Acad. Sci. USA 83:8258-8262, 1986; U.S. Pat. No. 4,935,233 and U.S. Pat. No. 4,751,180. The linker sequence may generally be from 1 to about 50 amino acids in length. Linker sequences are not required when the first and second polypeptides have non-essential N-terminal amino acid regions that can be used to separate the functional domains and prevent steric interference.

[0735] The ligated DNA sequences are operably linked to suitable transcriptional or translational regulatory elements. The regulatory elements responsible for expression of DNA are located only 5′ to the DNA sequence encoding the first polypeptides. Similarly, stop codons required to end translation and transcription termination signals are only present 3′ to the DNA sequence encoding the second polypeptide.

[0736] The fusion polypeptide can comprise a polypeptide as described herein together with an unrelated immunogenic protein, such as an immunogenic protein capable of eliciting a recall response. Examples of such proteins include tetanus, tuberculosis and hepatitis proteins (see, for example, Stoute et al. New Engl. J. Med., 336:86-91, 1997).

[0737] In one preferred embodiment, the immunological fusion partner is derived from a Mycobacterium sp., such as a Mycobacterium tuberculosis-derived Ra12 fragment. Ra12 compositions and methods for their use in enhancing the expression and/or immunogenicity of heterologous polynucleotide/polypeptide sequences are described in U.S. Patent Application No. 60/158,585, the disclosure of which is incorporated herein by reference in its entirety. Briefly, Ra12 refers to a polynucleotide region that is a subsequence of a Mycobacterium tuberculosis MTB32A nucleic acid. MTB32A is a serine protease of 32 KD molecular weight encoded by a gene in virulent and a virulent strains of M. tuberculosis. The nucleotide sequence and amino acid sequence of MTB32A have been described (for example, U.S. Patent Application No. 60/158,585; see also, Skeiky et al., Infection and Immun. (1999) 67:3998-4007, incorporated herein by reference). C-terminal fragments of the MTB32A coding sequence express at high levels and remain as a soluble polypeptides throughout the purification process. Moreover, Ra12 may enhance the immunogenicity of heterologous immunogenic polypeptides with which it is fused. One preferred Ra12 fusion polypeptide comprises a 14 KD C-terminal fragment corresponding to amino acid residues 192 to 323 of MTB32A. Other preferred Ra12 polynucleotides generally comprise at least about 15 consecutive nucleotides, at least about 30 nucleotides, at least about 60 nucleotides, at least about 100 nucleotides, at least about 200 nucleotides, or at least about 300 nucleotides that encode a portion of a Ra12 polypeptide. Ra12 polynucleotides may comprise a native sequence (i.e., an endogenous sequence that encodes a Ra12 polypeptide or a portion thereof) or may comprise a variant of such a sequence. Ra12 polynucleotide variants may contain one or more substitutions, additions, deletions and/or insertions such that the biological activity of the encoded fusion polypeptide is not substantially diminished, relative to a fusion polypeptide comprising a native Ra12 polypeptide. Variants preferably exhibit at least about 70% identity, more preferably at least about 80% identity and most preferably at least about 90% identity to a polynucleotide sequence that encodes a native Ra12 polypeptide or a portion thereof.

[0738] Within other preferred embodiments, an immunological fusion partner is derived from protein D, a surface protein of the gram-negative bacterium Haemophilus influenza B (WO 91/18926). Preferably, a protein D derivative comprises approximately the first third of the protein (e.g., the first N-terminal 100-110 amino acids), and a protein D derivative may be lipidated. Within certain preferred embodiments, the first 109 residues of a Lipoprotein D fusion partner is included on the N-terminus to provide the polypeptide with additional exogenous T-cell epitopes and to increase the expression level in E. coli (thus functioning as an expression enhancer). The lipid tail ensures optimal presentation of the antigen to antigen presenting cells. Other fusion partners include the non-structural protein from influenzae virus, NS 1 (hemaglutinin). Typically, the N-terminal 81 amino acids are used, although different fragments that include T-helper epitopes may be used.

[0739] In another embodiment, the immunological fusion partner is the protein known as LYTA, or a portion thereof (preferably a C-terminal portion). LYTA is derived from Streptococcus pneumoniae, which synthesizes an N-acetyl-L-alanine amidase known as amidase LYTA (encoded by the LytA gene; Gene 43:265-292, 1986). LYTA is an autolysin that specifically degrades certain bonds in the peptidoglycan backbone. The C-terminal domain of the LYTA protein is responsible for the affinity to the choline or to some choline analogues such as DEAE. This property has been exploited for the development of E. coli C-LYTA expressing plasmids useful for expression of fusion proteins. Purification of hybrid proteins containing the C-LYTA fragment at the amino terminus has been described (see Biotechnology 10:795-798, 1992). Within a preferred embodiment, a repeat portion of LYTA may be incorporated into a fusion polypeptide. A repeat portion is found in the C-terminal region starting at residue 178. A particularly preferred repeat portion incorporates residues 188-305.

[0740] Yet another illustrative embodiment involves fusion polypeptides, and the polynucleotides encoding them, wherein the fusion partner comprises a targeting signal capable of directing a polypeptide to the endosomal/lysosomal compartment, as described in U.S. Pat. No. 5,633,234. An immunogenic polypeptide of the invention, when fused with this targeting signal, will associate more efficiently with MHC class II molecules and thereby provide enhanced in vivo stimulation of CD4⁺ T-cells specific for the polypeptide.

[0741] Polypeptides of the invention are prepared using any of a variety of well known synthetic and/or recombinant techniques, the latter of which are further described below. Polypeptides, portions and other variants generally less than about 150 amino acids can be generated by synthetic means, using techniques well known to those of ordinary skill in the art. In one illustrative example, such polypeptides are synthesized using any of the commercially available solid-phase techniques, such as the Merrifield solid-phase synthesis method, where amino acids are sequentially added to a growing amino acid chain. See Merrifield, J. Am. Chem. Soc. 85:2149-2146, 1963. Equipment for automated synthesis of polypeptides is commercially available from suppliers such as Perkin Elmer/Applied BioSystems Division (Foster City, Calif.), and may be operated according to the manufacturer's instructions.

[0742] In general, polypeptide compositions (including fusion polypeptides) of the invention are isolated. An “isolated” polypeptide is one that is removed from its original environment. For example, a naturally-occurring protein or polypeptide is isolated if it is separated from some or all of the coexisting materials in the natural system. Preferably, such polypeptides are also purified, e.g., are at least about 90% pure, more preferably at least about 95% pure and most preferably at least about 99% pure.

[0743] Polynucleotide Compositions

[0744] The present invention, in other aspects, provides polynucleotide compositions. The terms “DNA” and “polynucleotide” are used essentially interchangeably herein to refer to a DNA molecule that has been isolated free of total genomic DNA of a particular species. “Isolated,” as used herein, means that a polynucleotide is substantially away from other coding sequences, and that the DNA molecule does not contain large portions of unrelated coding DNA, such as large chromosomal fragments or other functional genes or polypeptide coding regions. Of course, this refers to the DNA molecule as originally isolated, and does not exclude genes or coding regions later added to the segment by the hand of man.

[0745] As will be understood by those skilled in the art, the polynucleotide compositions of this invention can include genomic sequences, extra-genomic and plasmid-encoded sequences and smaller engineered gene segments that express, or may be adapted to express, proteins, polypeptides, peptides and the like. Such segments may be naturally isolated, or modified synthetically by the hand of man.

[0746] As will be also recognized by the skilled artisan, polynucleotides of the invention may be single-stranded (coding or antisense) or double-stranded, and may be DNA (genomic, cDNA or synthetic) or RNA molecules. RNA molecules may include HnRNA molecules, which contain introns and correspond to a DNA molecule in a one-to-one manner, and mRNA molecules, which do not contain introns. Additional coding or non-coding sequences may, but need not, be present within a polynucleotide of the present invention, and a polynucleotide may, but need not, be linked to other molecules and/or support materials.

[0747] Polynucleotides may comprise a native sequence (i.e., an endogenous sequence that encodes a polypeptide/protein of the invention or a portion thereof) or may comprise a sequence that encodes a variant or derivative, preferably an immunogenic variant or derivative, of such a sequence.

[0748] Therefore, according to another aspect of the present invention, polynucleotide compositions are provided that comprise some or all of a polynucleotide sequence set forth in any one of SEQ ID NOs: 1-111, 115-171, 173-175, 177, 179-305, 307-315, 326, 328, 330, 332-335, 340-375, 381, 382, 384-476, 524, 526, 530, 531, 533, 535, 536, 552, 569-572, 587, 591, 593-606, 618-705, 709-774, 777, 789, 817, 823, 824, 878, 880-882, 894, 896, 907, 908, 916-919, 929-931, 938, 939 and 942, complements of a polynucleotide sequence set forth in any one of SEQ ID NOs: 1-111, 115-171, 173-175, 177, 179-305, 307-315, 326, 328, 330, 332-335, 340-375, 381, 382, 384-476, 524, 526, 530, 531, 533, 535, 536, 552, 569-572, 587, 591, 593-606, 618-705, 709-774, 777, 789, 817, 823, 824, 878, 880-882, 894, 896, 907, 908, 916-919, 929-931, 938, 939 and 942, and degenerate variants of a polynucleotide sequence set forth in any one of SEQ ID NOs: 1 -111, 115-171, 173-175, 177, 179-305, 307-315, 326, 328, 330, 332-335, 340-375, 381, 382, 384-476, 524, 526, 530, 531, 533, 535, 536, 552, 569-572, 587, 591, 593-606, 618-705, 709-774, 777, 789, 817, 823, 824, 878, 880-882, 894, 896, 907, 908, 916-919, 929-931, 938, 939 and 942. In certain preferred embodiments, the polynucleotide sequences set forth herein encode immunogenic polypeptides, as described above.

[0749] In other related embodiments, the present invention provides polynucleotide variants having substantial identity to the sequences disclosed herein in SEQ ID NOs: 1-111, 115-171, 173-175, 177, 179-305, 307-315, 326, 328, 330, 332-335, 340-375, 381, 382, 384-476, 524, 526, 530, 531, 533, 535, 536, 552, 569-572, 587, 591, 593-606, 618-705, 709-774, 777, 789, 817, 823, 824, 878, 880-882, 894, 896, 907, 908, 916-919, 929-931, 938, 939 and 942, for example those comprising at least 70% sequence identity, preferably at least 75%, 80%, 85%, 90%, 95%, 96%, 97%, 98%, or 99% or higher, sequence identity compared to a polynucleotide sequence of this invention using the methods described herein, (e.g., BLAST analysis using standard parameters, as described below). One skilled in this art will recognize that these values can be appropriately adjusted to determine corresponding identity of proteins encoded by two nucleotide sequences by taking into account codon degeneracy, amino acid similarity, reading frame positioning and the like.

[0750] Typically, polynucleotide variants will contain one or more substitutions, additions, deletions and/or insertions, preferably such that the immunogenicity of the polypeptide encoded by the variant polynucleotide is not substantially diminished relative to a polypeptide encoded by a polynucleotide sequence specifically set forth herein). The term “variants” should also be understood to encompasses homologous genes of xenogenic origin.

[0751] In additional embodiments, the present invention provides polynucleotide fragments comprising various lengths of contiguous stretches of sequence identical to, or complementary to, one or more of the sequences disclosed herein. For example, polynucleotides are provided by this invention that comprise at least about 10, 15, 20, 30, 40, 50, 75, 100, 150, 200, 300, 400, 500 or 1000 or more contiguous nucleotides of one or more of the sequences disclosed herein as well as all intermediate lengths there between. It will be readily understood that “intermediate lengths”, in this context, means any length between the quoted values, such as 16, 17, 18, 19, etc.; 21, 22, 23, etc.; 30, 31, 32, etc.; 50, 51, 52, 53, etc.; 100, 101, 102, 103, etc.; 150, 151, 152, 153, etc.; including all integers through 200-500; 500-1,000, and the like.

[0752] In another embodiment of the invention, polynucleotide compositions are provided that are capable of hybridizing under moderate to high stringency conditions to a polynucleotide sequence provided herein, or a fragment thereof, or a complementary sequence thereof. Hybridization techniques are well known in the art of molecular biology. For purposes of illustration, suitable moderately stringent conditions for testing the hybridization of a polynucleotide of this invention with other polynucleotides include prewashing in a solution of 5× SSC, 0.5% SDS, 1.0 mM EDTA (pH 8.0); hybridizing at 50° C.-60° C., 5× SSC, overnight; followed by washing twice at 65° C. for 20 minutes with each of 2×, 0.5× and 0.2× SSC containing 0.1% SDS. One skilled in the art will understand that the stringency of hybridization can be readily manipulated, such as by altering the salt content of the hybridization solution and/or the temperature at which the hybridization is performed. For example, in another embodiment, suitable highly stringent hybridization conditions include those described above, with the exception that the temperature of hybridization is increased, e.g., to 60-65° C. or 65-70° C.

[0753] In certain preferred embodiments, the polynucleotides described above, e.g., polynucleotide variants, fragments and hybridizing sequences, encode polypeptides that are immunologically cross-reactive with a polypeptide sequence specifically set forth herein. In other preferred embodiments, such polynucleotides encode polypeptides that have a level of immunogenic activity of at least about 50%, preferably at least about 70%, and more preferably at least about 90% of that for a polypeptide sequence specifically set forth herein.

[0754] The polynucleotides of the present invention, or fragments thereof, regardless of the length of the coding sequence itself, may be combined with other DNA sequences, such as promoters, polyadenylation signals, additional restriction enzyme sites, multiple cloning sites, other coding segments, and the like, such that their overall length may vary considerably. It is therefore contemplated that a nucleic acid fragment of almost any length may be employed, with the total length preferably being limited by the ease of preparation and use in the intended recombinant DNA protocol. For example, illustrative polynucleotide segments with total lengths of about 10,000, about 5000, about 3000, about 2,000, about 1,000, about 500, about 200, about 100, about 50 base pairs in length, and the like, (including all intermediate lengths) are contemplated to be useful in many implementations of this invention.

[0755] When comparing polynucleotide sequences, two sequences are said to be “identical” if the sequence of nucleotides in the two sequences is the same when aligned for maximum correspondence, as described below. Comparisons between two sequences are typically performed by comparing the sequences over a comparison window to identify and compare local regions of sequence similarity. A “comparison window” as used herein, refers to a segment of at least about 20 contiguous positions, usually 30 to about 75, preferably 40 to about 50, in which a sequence may be compared to a reference sequence of the same number of contiguous positions after the two sequences are optimally aligned.

[0756] Optimal alignment of sequences for comparison may be conducted using the Megalign program in the Lasergene suite of bioinformatics software (DNASTAR, Inc., Madison, Wis.), using default parameters. This program embodies several alignment schemes described in the following references: Dayhoff, M. O. (1978) A model of evolutionary change in proteins—Matrices for detecting distant relationships. In Dayhoff, M. O. (ed.) Atlas of Protein Sequence and Structure, National Biomedical Research Foundation, Washington DC Vol. 5, Suppl. 3, pp. 345-358; Hein J. (1990) Unified Approach to Alignment and Phylogenes pp. 626-645 Methods in Enzymology vol. 183, Academic Press, Inc., San Diego, Calif.; Higgins, D. G. and Sharp, P. M. (1989) CABIOS 5:151-153; Myers, E. W. and Muller W. (1988) CABIOS 4:11-17; Robinson, E. D. (1971) Comb. Theor 11:105; Santou, N. Nes, M. (1987) Mol. Biol. Evol. 4:406-425; Sneath, P. H. A. and Sokal, R. R. (1973) Numerical Taxonomy—the Principles and Practice of Numerical Taxonomy, Freeman Press, San Francisco, Calif.; Wilbur, W. J. and Lipman, D. J. (1983) Proc. Natl. Acad., Sci. USA 80:726-730.

[0757] Alternatively, optimal alignment of sequences for comparison may be conducted by the local identity algorithm of Smith and Waterman (1981) Add. APL. Math 2:482, by the identity alignment algorithm of Needleman and Wunsch (1970) J. Mol. Biol. 48:443, by the search for similarity methods of Pearson and Lipman (1988) Proc. Natl. Acad. Sci. USA 85: 2444, by computerized implementations of these algorithms (GAP, BESTFIT, BLAST, FASTA, and TFASTA in the Wisconsin Genetics Software Package, Genetics Computer Group (GCG), 575 Science Dr., Madison, Wis.), or by inspection.

[0758] One preferred example of algorithms that are suitable for determining percent sequence identity and sequence similarity are the BLAST and BLAST 2.0 algorithms, which are described in Altschul et al. (1977) Nucl. Acids Res. 25:3389-3402 and Altschul et al. (1990) J. Mol. Biol. 215:403-410, respectively. BLAST and BLAST 2.0 can be used, for example with the parameters described herein, to determine percent sequence identity for the polynucleotides of the invention. Software for performing BLAST analyses is publicly available through the National Center for Biotechnology Information. In one illustrative example, cumulative scores can be calculated using, for nucleotide sequences, the parameters M (reward score for a pair of matching residues; always >0) and N (penalty score for mismatching residues; always <0). Extension of the word hits in each direction are halted when: the cumulative alignment score falls off by the quantity X from its maximum achieved value; the cumulative score goes to zero or below, due to the accumulation of one or more negative-scoring residue alignments; or the end of either sequence is reached. The BLAST algorithm parameters W, T and X determine the sensitivity and speed of the alignment. The BLASTN program (for nucleotide sequences) uses as defaults a wordlength (W) of 11, and expectation (E) of 10, and the BLOSUM62 scoring matrix (see Henikoff and Henikoff (1989) Proc. Natl. Acad. Sci. USA 89:10915) alignments, (B) of 50, expectation (E) of 10, M=5, N=-4 and a comparison of both strands.

[0759] Preferably, the “percentage of sequence identity” is determined by comparing two optimally aligned sequences over a window of comparison of at least 20 positions, wherein the portion of the polynucleotide sequence in the comparison window may comprise additions or deletions (i.e., gaps) of 20 percent or less, usually 5 to 15 percent, or 10 to 12 percent, as compared to the reference sequences (which does not comprise additions or deletions) for optimal alignment of the two sequences. The percentage is calculated by determining the number of positions at which the identical nucleic acid bases occurs in both sequences to yield the number of matched positions, dividing the number of matched positions by the total number of positions in the reference sequence (i.e., the window size) and multiplying the results by 100 to yield the percentage of sequence identity.

[0760] It will be appreciated by those of ordinary skill in the art that, as a result of the degeneracy of the genetic code, there are many nucleotide sequences that encode a polypeptide as described herein. Some of these polynucleotides bear minimal homology to the nucleotide sequence of any native gene. Nonetheless, polynucleotides that vary due to differences in codon usage are specifically contemplated by the present invention. Further, alleles of the genes comprising the polynucleotide sequences provided herein are within the scope of the present invention. Alleles are endogenous genes that are altered as a result of one or more mutations, such as deletions, additions and/or substitutions of nucleotides. The resulting mRNA and protein may, but need not, have an altered structure or function. Alleles may be identified using standard techniques (such as hybridization, amplification and/or database sequence comparison).

[0761] Therefore, in another embodiment of the invention, a mutagenesis approach, such as site-specific mutagenesis, is employed for the preparation of immunogenic variants and/or derivatives of the polypeptides described herein. By this approach, specific modifications in a polypeptide sequence can be made through mutagenesis of the underlying polynucleotides that encode them. These techniques provides a straightforward approach to prepare and test sequence variants, for example, incorporating one or more of the foregoing considerations, by introducing one or more nucleotide sequence changes into the polynucleotide.

[0762] Site-specific mutagenesis allows the production of mutants through the use of specific oligonucleotide sequences which encode the DNA sequence of the desired mutation, as well as a sufficient number of adjacent nucleotides, to provide a primer sequence of sufficient size and sequence complexity to form a stable duplex on both sides of the deletion junction being traversed. Mutations may be employed in a selected polynucleotide sequence to improve, alter, decrease, modify, or otherwise change the properties of the polynucleotide itself, and/or alter the properties, activity, composition, stability, or primary sequence of the encoded polypeptide.

[0763] In certain embodiments of the present invention, the inventors contemplate the mutagenesis of the disclosed polynucleotide sequences to alter one or more properties of the encoded polypeptide, such as the immunogenicity of a polypeptide vaccine. The techniques of site-specific mutagenesis are well-known in the art, and are widely used to create variants of both polypeptides and polynucleotides. For example, site-specific mutagenesis is often used to alter a specific portion of a DNA molecule. In such embodiments, a primer comprising typically about 14 to about 25 nucleotides or so in length is employed, with about 5 to about 10 residues on both sides of the junction of the sequence being altered.

[0764] As will be appreciated by those of skill in the art, site-specific mutagenesis techniques have often employed a phage vector that exists in both a single stranded and double stranded form. Typical vectors useful in site-directed mutagenesis include vectors such as the M13 phage. These phage are readily commercially-available and their use is generally well-known to those skilled in the art. Double-stranded plasmids are also routinely employed in site directed mutagenesis that eliminates the step of transferring the gene of interest from a plasmid to a phage.

[0765] In general, site-directed mutagenesis in accordance herewith is performed by first obtaining a single-stranded vector or melting apart of two strands of a double-stranded vector that includes within its sequence a DNA sequence that encodes the desired peptide. An oligonucleotide primer bearing the desired mutated sequence is prepared, generally synthetically. This primer is then annealed with the single-stranded vector, and subjected to DNA polymerizing enzymes such as E. coli polymerase I Klenow fragment, in order to complete the synthesis of the mutation-bearing strand. Thus, a heteroduplex is formed wherein one strand encodes the original non-mutated sequence and the second strand bears the desired mutation. This heteroduplex vector is then used to transform appropriate cells, such as E. coli cells, and clones are selected which include recombinant vectors bearing the mutated sequence arrangement.

[0766] The preparation of sequence variants of the selected peptide-encoding DNA segments using site-directed mutagenesis provides a means of producing potentially useful species and is not meant to be limiting as there are other ways in which sequence variants of peptides and the DNA sequences encoding them may be obtained. For example, recombinant vectors encoding the desired peptide sequence may be treated with mutagenic agents, such as hydroxylamine, to obtain sequence variants. Specific details regarding these methods and protocols are found in the teachings of Maloy et al., 1994; Segal, 1976; Prokop and Bajpai, 1991; Kuby, 1994; and Maniatis et al., 1982, each incorporated herein by reference, for that purpose.

[0767] As used herein, the term “oligonucleotide directed mutagenesis procedure” refers to template-dependent processes and vector-mediated propagation which result in an increase in the concentration of a specific nucleic acid molecule relative to its initial concentration, or in an increase in the concentration of a detectable signal, such as amplification. As used herein, the term “oligonucleotide directed mutagenesis procedure” is intended to refer to a process that involves the template-dependent extension of a primer molecule. The term template dependent process refers to nucleic acid synthesis of an RNA or a DNA molecule wherein the sequence of the newly synthesized strand of nucleic acid is dictated by the well-known rules of complementary base pairing (see, for example, Watson, 1987). Typically, vector mediated methodologies involve the introduction of the nucleic acid fragment into a DNA or RNA vector, the clonal amplification of the vector, and the recovery of the amplified nucleic acid fragment. Examples of such methodologies are provided by U.S. Pat. No. 4,237,224, specifically incorporated herein by reference in its entirety.

[0768] In another approach for the production of polypeptide variants of the present invention, recursive sequence recombination, as described in U.S. Pat. No. 5,837,458, may be employed. In this approach, iterative cycles of recombination and screening or selection are performed to “evolve” individual polynucleotide variants of the invention having, for example, enhanced immunogenic activity.

[0769] In other embodiments of the present invention, the polynucleotide sequences provided herein can be advantageously used as probes or primers for nucleic acid hybridization. As such, it is contemplated that nucleic acid segments that comprise a sequence region of at least about 15 contiguous nucleotides that has the same sequence as, or is complementary to, a 15 nucleotide long contiguous sequence disclosed herein will find particular utility. Longer contiguous identical or complementary sequences, e.g., those of about 20, 30, 40, 50, 100, 200, 500, 1000 (including all intermediate lengths) and even up to full length sequences will also be of use in certain embodiments.

[0770] The ability of such nucleic acid probes to specifically hybridize to a sequence of interest will enable them to be of use in detecting the presence of complementary sequences in a given sample. However, other uses are also envisioned, such as the use of the sequence information for the preparation of mutant species primers, or primers for use in preparing other genetic constructions.

[0771] Polynucleotide molecules having sequence regions consisting of contiguous nucleotide stretches of 10-14, 15-20, 30, 50, or even of 100-200 nucleotides or so (including intermediate lengths as well), identical or complementary to a polynucleotide sequence disclosed herein, are particularly contemplated as hybridization probes for use in, e.g., Southern and Northern blotting. This would allow a gene product, or fragment thereof, to be analyzed, both in diverse cell types and also in various bacterial cells. The total size of fragment, as well as the size of the complementary stretch(es), will ultimately depend on the intended use or application of the particular nucleic acid segment. Smaller fragments will generally find use in hybridization embodiments, wherein the length of the contiguous complementary region may be varied, such as between about 15 and about 100 nucleotides, but larger contiguous complementarity stretches may be used, according to the length complementary sequences one wishes to detect.

[0772] The use of a hybridization probe of about 15-25 nucleotides in length allows the formation of a duplex molecule that is both stable and selective. Molecules having contiguous complementary sequences over stretches greater than 15 bases in length are generally preferred, though, in order to increase stability and selectivity of the hybrid, and thereby improve the quality and degree of specific hybrid molecules obtained. One will generally prefer to design nucleic acid molecules having gene-complementary stretches of 15 to 25 contiguous nucleotides, or even longer where desired.

[0773] Hybridization probes may be selected from any portion of any of the sequences disclosed herein. All that is required is to review the sequences set forth herein, or to any continuous portion of the sequences, from about 15-25 nucleotides in length up to and including the full length sequence, that one wishes to utilize as a probe or primer. The choice of probe and primer sequences may be governed by various factors. For example, one may wish to employ primers from towards the termini of the total sequence.

[0774] Small polynucleotide segments or fragments may be readily prepared by, for example, directly synthesizing the fragment by chemical means, as is commonly practiced using an automated oligonucleotide synthesizer. Also, fragments may be obtained by application of nucleic acid reproduction technology, such as the PCR™ technology of U.S. Pat. No. 4,683,202 (incorporated herein by reference), by introducing selected sequences into recombinant vectors for recombinant production, and by other recombinant DNA techniques generally known to those of skill in the art of molecular biology.

[0775] The nucleotide sequences of the invention may be used for their ability to selectively form duplex molecules with complementary stretches of the entire gene or gene fragments of interest. Depending on the application envisioned, one will typically desire to employ varying conditions of hybridization to achieve varying degrees of selectivity of probe towards target sequence. For applications requiring high selectivity, one will typically desire to employ relatively stringent conditions to form the hybrids, e.g., one will select relatively low salt and/or high temperature conditions, such as provided by a salt concentration of from about 0.02 M to about 0.15 M salt at temperatures of from about 50° C. to about 70° C. Such selective conditions tolerate little, if any, mismatch between the probe and the template or target strand, and would be particularly suitable for isolating related sequences.

[0776] Of course, for some applications, for example, where one desires to prepare mutants employing a mutant primer strand hybridized to an underlying template, less stringent (reduced stringency) hybridization conditions will typically be needed in order to allow formation of the heteroduplex. In these circumstances, one may desire to employ salt conditions such as those of from about 0.15 M to about 0.9 M salt, at temperatures ranging from about 20° C. to about 55° C. Cross-hybridizing species can thereby be readily identified as positively hybridizing signals with respect to control hybridizations. In any case, it is generally appreciated that conditions can be rendered more stringent by the addition of increasing amounts of formamide, which serves to destabilize the hybrid duplex in the same manner as increased temperature. Thus, hybridization conditions can be readily manipulated, and thus will generally be a method of choice depending on the desired results.

[0777] According to another embodiment of the present invention, polynucleotide compositions comprising antisense oligonucleotides are provided. Antisense oligonucleotides have been demonstrated to be effective and targeted inhibitors of protein synthesis, and, consequently, provide a therapeutic approach by which a disease can be treated by inhibiting the synthesis of proteins that contribute to the disease. The efficacy of antisense oligonucleotides for inhibiting protein synthesis is well established. For example, the synthesis of polygalactauronase and the muscarine type 2 acetylcholine receptor are inhibited by antisense oligonucleotides directed to their respective mRNA sequences (U.S. Pat. Nos. 5,739,119 and 5,759,829). Further, examples of antisense inhibition have been demonstrated with the nuclear protein cyclin, the multiple drug resistance gene (MDG1), ICAM-1, E-selectin, STK-1, striatal GABAA receptor and human EGF (Jaskulski et al., Science. Jun. 10, 1988;240(4858):1544-6; Vasanthakumar and Ahmed, Cancer Commun. 1989; 1(4):225-32; Peris et al., Brain Res Mol Brain Res. Jun. 15, 1998; 57(2):310-20; U.S. Pat. Nos. 5,801,154; 5,789,573; 5,718,709 and 5,610,288). Antisense constructs have also been described that inhibit and can be used to treat a variety of abnormal cellular proliferations, e.g. cancer (U.S. Pat. Nos. 5,747,470; 5,591,317 and 5,783,683).

[0778] Therefore, in certain embodiments, the present invention provides oligonucleotide sequences that comprise all, or a portion of, any sequence that is capable of specifically binding to polynucleotide sequence described herein, or a complement thereof. In one embodiment, the antisense oligonucleotides comprise DNA or derivatives thereof. In another embodiment, the oligonucleotides comprise RNA or derivatives thereof. In a third embodiment, the oligonucleotides are modified DNAs comprising a phosphorothioated modified backbone. In a fourth embodiment, the oligonucleotide sequences comprise peptide nucleic acids or derivatives thereof. In each case, preferred compositions comprise a sequence region that is complementary, and more preferably substantially-complementary, and even more preferably, completely complementary to one or more portions of polynucleotides disclosed herein. Selection of antisense compositions specific for a given gene sequence is based upon analysis of the chosen target sequence and determination of secondary structure, Tₘ, binding energy, and relative stability. Antisense compositions may be selected based upon their relative inability to form dimers, hairpins, or other secondary structures that would reduce or prohibit specific binding to the target mRNA in a host cell. Highly preferred target regions of the mRNA, are those which are at or near the AUG translation initiation codon, and those sequences which are substantially complementary to 5′ regions of the mRNA. These secondary structure analyses and target site selection considerations can be performed, for example, using v.4 of the OLIGO primer analysis software and/or the BLASTN 2.0.5 algorithm software (Altschul et al., Nucleic Acids Res. Sep. 1, 1997;25(17):3389-402).

[0779] The use of an antisense delivery method employing a short peptide vector, termed MPG (27 residues), is also contemplated. The MPG peptide contains a hydrophobic domain derived from the fusion sequence of HIV gp4l and a hydrophilic domain from the nuclear localization sequence of SV40 T-antigen (Morris et al., Nucleic Acids Res. Jul. 15, 1997;25(14):2730-6). It has been demonstrated that several molecules of the MPG peptide coat the antisense oligonucleotides and can be delivered into cultured mammalian cells in less than 1 hour with relatively high efficiency (90%). Further, the interaction with MPG strongly increases both the stability of the oligonucleotide to nuclease and the ability to cross the plasma membrane.

[0780] According to another embodiment of the invention, the polynucleotide compositions described herein are used in the design and preparation of ribozyme molecules for inhibiting expression of the tumor polypeptides and proteins of the present invention in tumor cells. Ribozymes are RNA-protein complexes that cleave nucleic acids in a site-specific fashion. Ribozymes have specific catalytic domains that possess endonuclease activity (Kim and Cech, Proc Natl Acad Sci USA. December 1987;84(24):8788-92; Forster and Symons, Cell. Apr. 24, 1987;49(2):211-20). For example, a large number of ribozymes accelerate phosphoester transfer reactions with a high degree of specificity, often cleaving only one of several phosphoesters in an oligonucleotide substrate (Cech et al., Cell. December 1981;27(3 Pt 2):487-96; Michel and Westhof, J Mol Biol. Dec. 5, 1990;216(3):585-610; Reinhold-Hurek and Shub, Nature. May 14, 1992;357(6374):173-6). This specificity has been attributed to the requirement that the substrate bind via specific base-pairing interactions to the internal guide sequence (“IGS”) of the ribozyme prior to chemical reaction.

[0781] Six basic varieties of naturally-occurring enzymatic RNAs are known presently. Each can catalyze the hydrolysis of RNA phosphodiester bonds in trans (and thus can cleave other RNA molecules) under physiological conditions. In general, enzymatic nucleic acids act by first binding to a target RNA. Such binding occurs through the target binding portion of a enzymatic nucleic acid which is held in close proximity to an enzymatic portion of the molecule that acts to cleave the target RNA. Thus, the enzymatic nucleic acid first recognizes and then binds a target RNA through complementary base-pairing, and once bound to the correct site, acts enzymatically to cut the target RNA. Strategic cleavage of such a target RNA will destroy its ability to direct synthesis of an encoded protein. After an enzymatic nucleic acid has bound and cleaved its RNA target, it is released from that RNA to search for another target and can repeatedly bind and cleave new targets.

[0782] The enzymatic nature of a ribozyme is advantageous over many technologies, such as antisense technology (where a nucleic acid molecule simply binds to a nucleic acid target to block its translation) since the concentration of ribozyme necessary to affect a therapeutic treatment is lower than that of an antisense oligonucleotide. This advantage reflects the ability of the ribozyme to act enzymatically. Thus, a single ribozyme molecule is able to cleave many molecules of target RNA. In addition, the ribozyme is a highly specific inhibitor, with the specificity of inhibition depending not only on the base pairing mechanism of binding to the target RNA, but also on the mechanism of target RNA cleavage. Single mismatches, or base-substitutions, near the site of cleavage can completely eliminate catalytic activity of a ribozyme. Similar mismatches in antisense molecules do not prevent their action (Woolf et al., Proc Natl Acad Sci USA. Aug. 15, 1992;89(16):7305-9). Thus, the specificity of action of a ribozyme is greater than that of an antisense oligonucleotide binding the same RNA site.

[0783] The enzymatic nucleic acid molecule may be formed in a hammerhead, hairpin, a hepatitis δ virus, group I intron or RNaseP RNA (in association with an RNA guide sequence) or Neurospora VS RNA motif. Examples of hammerhead motifs are described by Rossi et al. Nucleic Acids Res. Sep. 11, 1992;20(17):4559-65. Examples of hairpin motifs are described by Hampel et al. (Eur. Pat. Appl. Publ. No. EP 0360257), Hampel and Tritz, Biochemistry Jun. 13, 1989;28(12):4929-33; Hampel et al., Nucleic Acids Res. Jan. 25, 1990;18(2):299-304 and U.S. Pat. No. 5,631,359. An example of the hepatitis δ virus motif is described by Perrotta and Been, Biochemistry. Dec. 1, 1992;31(47):11843-52; an example of the RNaseP motif is described by Guerrier-Takada et al., Cell. December 1983;35(3 Pt 2):849-57; Neurospora VS RNA ribozyme motif is described by Collins (Saville and Collins, Cell. May 18, 1990;61(4):685-96; Saville and Collins, Proc Natl Acad Sci USA. Oct. 1, 1991;88(19):8826-30; Collins and Olive, Biochemistry. Mar. 23, 1996;32(11):2795-9); and an example of the Group I intron is described in (U.S. Pat. No. 4,987,071). All that is important in an enzymatic nucleic acid molecule of this invention is that it has a specific substrate binding site which is complementary to one or more of the target gene RNA regions, and that it have nucleotide sequences within or surrounding that substrate binding site which impart an RNA cleaving activity to the molecule. Thus the ribozyme constructs need not be limited to specific motifs mentioned herein.

[0784] Ribozymes may be designed as described in Int. Pat. Appl. Publ. No. WO 93/23569 and Int. Pat. Appl. Publ. No. WO 94/02595, each specifically incorporated herein by reference) and synthesized to be tested in vitro and in vivo, as described. Such ribozymes can also be optimized for delivery. While specific examples are provided, those in the art will recognize that equivalent RNA targets in other species can be utilized when necessary.

[0785] Ribozyme activity can be optimized by altering the length of the ribozyme binding arms, or chemically synthesizing ribozymes with modifications that prevent their degradation by serum ribonucleases (see e.g., Int. Pat. Appl. Publ. No. WO 92/07065; Int. Pat. Appl. Publ. No. WO 93/15187; Int. Pat. Appl. Publ. No. WO 91/03162; Eur. Pat. Appl. Publ. No. 92110298.4; U.S. Pat. No. 5,334,711; and Int. Pat. Appl. Publ. No. WO 94/13688, which describe various chemical modifications that can be made to the sugar moieties of enzymatic RNA molecules), modifications which enhance their efficacy in cells, and removal of stem II bases to shorten RNA synthesis times and reduce chemical requirements.

[0786] Sullivan et al. (Int. Pat. Appl. Publ. No. WO 94/02595) describes the general methods for delivery of enzymatic RNA molecules. Ribozymes may be administered to cells by a variety of methods known to those familiar to the art, including, but not restricted to, encapsulation in liposomes, by iontophoresis, or by incorporation into other vehicles, such as hydrogels, cyclodextrins, biodegradable nanocapsules, and bioadhesive microspheres. For some indications, ribozymes may be directly delivered ex vivo to cells or tissues with or without the aforementioned vehicles. Alternatively, the RNA/vehicle combination may be locally delivered by direct inhalation, by direct injection or by use of a catheter, infusion pump or stent. Other routes of delivery include, but are not limited to, intravascular, intramuscular, subcutaneous or joint injection, aerosol inhalation, oral (tablet or pill form), topical, systemic, ocular, intraperitoneal and/or intrathecal delivery. More detailed descriptions of ribozyme delivery and administration are provided in Int. Pat. Appl. Publ. No. WO 94/02595 and Int. Pat. Appl. Publ. No. WO 93/23569, each specifically incorporated herein by reference.

[0787] Another means of accumulating high concentrations of a ribozyme(s) within cells is to incorporate the ribozyme-encoding sequences into a DNA expression vector. Transcription of the ribozyme sequences are driven from a promoter for eukaryotic RNA polymerase I (pol I), RNA polymerase II (pol II), or RNA polymerase III (pol III). Transcripts from pol II or pol III promoters will be expressed at high levels in all cells; the levels of a given pol II promoter in a given cell type will depend on the nature of the gene regulatory sequences (enhancers, silencers, etc.) present nearby. Prokaryotic RNA polymerase promoters may also be used, providing that the prokaryotic RNA polymerase enzyme is expressed in the appropriate cells Ribozymes expressed from such promoters have been shown to function in mammalian cells. Such transcription units can be incorporated into a variety of vectors for introduction into mammalian cells, including but not restricted to, plasmid DNA vectors, viral DNA vectors (such as adenovirus or adeno-associated vectors), or viral RNA vectors (such as retroviral, semliki forest virus, sindbis virus vectors).

[0788] In another embodiment of the invention, peptide nucleic acids (PNAs) compositions are provided. PNA is a DNA mimic in which the nucleobases are attached to a pseudopeptide backbone (Good and Nielsen, Antisense Nucleic Acid Drug Dev. 1997 7(4) 431-37). PNA is able to be utilized in a number methods that traditionally have used RNA or DNA. Often PNA sequences perform better in techniques than the corresponding RNA or DNA sequences and have utilities that are not inherent to RNA or DNA. A review of PNA including methods of making, characteristics of, and methods of using, is provided by Corey (Trends Biotechnol June 1997;15(6):224-9). As such, in certain embodiments, one may prepare PNA sequences that are complementary to one or more portions of the ACE mRNA sequence, and such PNA compositions may be used to regulate, alter, decrease, or reduce the translation of ACE-specific mRNA, and thereby alter the level of ACE activity in a host cell to which such PNA compositions have been administered.

[0789] PNAs have 2-aminoethyl-glycine linkages replacing the normal phosphodiester backbone of DNA (Nielsen et al., Science Dec. 6, 1991;254(5037):1497-500; Hanvey et al., Science. Nov. 27, 1992;258(5087):1481-5; Hyrup and Nielsen, Bioorg Med Chem. January 1996;4(1):5-23). This chemistry has three important consequences: firstly, in contrast to DNA or phosphorothioate oligonucleotides, PNAs are neutral molecules; secondly, PNAs are achiral, which avoids the need to develop a stereoselective synthesis; and thirdly, PNA synthesis uses standard Boc or Fmoc protocols for solid-phase peptide synthesis, although other methods, including a modified Merrifield method, have been used.

[0790] PNA monomers or ready-made oligomers are commercially available from PerSeptive Biosystems (Framingham, Mass.). PNA syntheses by either Boc or Fmoc protocols are straightforward using manual or automated protocols (Norton et al., Bioorg Med Chem. April 1995;3(4):437-45). The manual protocol lends itself to the production of chemically modified PNAs or the simultaneous synthesis of families of closely related PNAs.

[0791] As with peptide synthesis, the success of a particular PNA synthesis will depend on the properties of the chosen sequence. For example, while in theory PNAs can incorporate any combination of nucleotide bases, the presence of adjacent purines can lead to deletions of one or more residues in the product. In expectation of this difficulty, it is suggested that, in producing PNAs with adjacent purines, one should repeat the coupling of residues likely to be added inefficiently. This should be followed by the purification of PNAs by reverse-phase high-pressure liquid chromatography, providing yields and purity of product similar to those observed during the synthesis of peptides.

[0792] Modifications of PNAs for a given application may be accomplished by coupling amino acids during solid-phase synthesis or by attaching compounds that contain a carboxylic acid group to the exposed N-terminal amine. Alternatively, PNAs can be modified after synthesis by coupling to an introduced lysine or cysteine. The ease with which PNAs can be modified facilitates optimization for better solubility or for specific functional requirements. Once synthesized, the identity of PNAs and their derivatives can be confirmed by mass spectrometry. Several studies have made and utilized modifications of PNAs (for example, Norton et al., Bioorg Med Chem. April 1995;3(4):437-45; Petersen et al., J Pept. Sci. May-June 1995;1(3):175-83; Orum et al., Biotechniques. September 1995;19(3):472-80; Footer et al., Biochemistry. Aug. 20, 1996;35(33):10673-9; Griffith et al., Nucleic Acids Res. Aug. 11, 1995;23(15):3003-8; Pardridge et al., Proc Natl Acad Sci USA. Jun. 6, 1995;92(12):5592-6; Boffa et al., Proc Natl Acad Sci USA. Mar. 14, 1995;92(6):1901-5; Gambacorti-Passerini et al., Blood. Aug. 15, 1996;88(4):1411-7; Armitage et al., Proc Natl Acad Sci USA. Nov. 11, 1997;94(23):12320-5; Seeger et al., Biotechniques. September 1997;23(3):512-7). U.S. Pat. No. 5,700,922 discusses PNA-DNA-PNA chimeric molecules and their uses in diagnostics, modulating protein in organisms, and treatment of conditions susceptible to therapeutics.

[0793] Methods of characterizing the antisense binding properties of PNAs are discussed in Rose (Anal Chem. Dec. 15, 1993;65(24):3545-9) and Jensen et al. (Biochemistry. Apr. 22, 1997;36(16):5072-7). Rose uses capillary gel electrophoresis to determine binding of PNAs to their complementary oligonucleotide, measuring the relative binding kinetics and stoichiometry. Similar types of measurements were made by Jensen et al. using BIAcore™ technology.

[0794] Other applications of PNAs that have been described and will be apparent to the skilled artisan include use in DNA strand invasion, antisense inhibition, mutational analysis, enhancers of transcription, nucleic acid purification, isolation of transcriptionally active genes, blocking of transcription factor binding, genome cleavage, biosensors, in situ hybridization, and the like.

[0795] Polynucleotide Identification, Characterization and Expression

[0796] Polynucleotide compositions of the present invention may be identified, prepared and/or manipulated using any of a variety of well established techniques (see generally, Sambrook et al., Molecular Cloning: A Laboratory Manual, Cold Spring Harbor Laboratories, Cold Spring Harbor, N.Y., 1989, and other like references). For example, a polynucleotide may be identified, as described in more detail below, by screening a microarray of cDNAs for tumor-associated expression (i.e., expression that is at least two fold greater in a tumor than in normal tissue, as determined using a representative assay provided herein). Such screens may be performed, for example, using the microarray technology of Affymetrix, Inc. (Santa Clara, Calif.) according to the manufacturer's instructions (and essentially as described by Schena et al., Proc. Natl. Acad. Sci. USA 93:10614-10619, 1996 and Heller et al., Proc. Natl. Acad. Sci. USA 94:2150-2155, 1997). Alternatively, polynucleotides may be amplified from cDNA prepared from cells expressing the proteins described herein, such as tumor cells.

[0797] Many template dependent processes are available to amplify a target sequences of interest present in a sample. One of the best known amplification methods is the polymerase chain reaction (PCR™) which is described in detail in U.S. Pat. Nos. 4,683,195, 4,683,202 and 4,800,159, each of which is incorporated herein by reference in its entirety. Briefly, in PCR™, two primer sequences are prepared which are complementary to regions on opposite complementary strands of the target sequence. An excess of deoxynucleoside triphosphates is added to a reaction mixture along with a DNA polymerase (e.g., Taq polymerase). If the target sequence is present in a sample, the primers will bind to the target and the polymerase will cause the primers to be extended along the target sequence by adding on nucleotides. By raising and lowering the temperature of the reaction mixture, the extended primers will dissociate from the target to form reaction products, excess primers will bind to the target and to the reaction product and the process is repeated. Preferably reverse transcription and PCR™ amplification procedure may be performed in order to quantify the amount of mRNA amplified. Polymerase chain reaction methodologies are well known in the art.

[0798] Any of a number of other template dependent processes, many of which are variations of the PCR™ amplification technique, are readily known and available in the art. Illustratively, some such methods include the ligase chain reaction (referred to as LCR), described, for example, in Eur. Pat. Appl. Publ. No. 320,308 and U.S. Pat. No. 4,883,750; Qbeta Replicase, described in PCT Intl. Pat. Appl. Publ. No. PCT/US87/00880; Strand Displacement Amplification (SDA) and Repair Chain Reaction (RCR). Still other amplification methods are described in Great Britain Pat. Appl. No. 2 202 328, and in PCT Intl. Pat. Appl. Publ. No. PCT/US89/01025. Other nucleic acid amplification procedures include transcription-based amplification systems (TAS) (PCT Intl. Pat. Appl. Publ. No. WO 88/10315), including nucleic acid sequence based amplification (NASBA) and 3SR. Eur. Pat. Appl. Publ. No. 329,822 describes a nucleic acid amplification process involving cyclically synthesizing single-stranded RNA (“ssRNA”), ssDNA, and double-stranded DNA (dsDNA). PCT Intl. Pat. Appl. Publ. No. WO 89/06700 describes a nucleic acid sequence amplification scheme based on the hybridization of a promoter/primer sequence to a target single-stranded DNA (“ssDNA”) followed by transcription of many RNA copies of the sequence. Other amplification methods such as “RACE” (Frohman, 1990), and “one-sided PCR” (Ohara, 1989) are also well-known to those of skill in the art.

[0799] An amplified portion of a polynucleotide of the present invention may be used to isolate a full length gene from a suitable library (e.g., a tumor cDNA library) using well known techniques. Within such techniques, a library (cDNA or genomic) is screened using one or more polynucleotide probes or primers suitable for amplification. Preferably, a library is size-selected to include larger molecules. Random primed libraries may also be preferred for identifying 5′ and upstream regions of genes. Genomic libraries are preferred for obtaining introns and extending 5′ sequences.

[0800] For hybridization techniques, a partial sequence may be labeled (e.g., by nick-translation or end-labeling with ³²P) using well known techniques. A bacterial or bacteriophage library is then generally screened by hybridizing filters containing denatured bacterial colonies (or lawns containing phage plaques) with the labeled probe (see Sambrook et al., Molecular Cloning: A Laboratory Manual, Cold Spring Harbor Laboratories, Cold Spring Harbor, N.Y., 1989). Hybridizing colonies or plaques are selected and expanded, and the DNA is isolated for further analysis. cDNA clones may be analyzed to determine the amount of additional sequence by, for example, PCR using a primer from the partial sequence and a primer from the vector. Restriction maps and partial sequences may be generated to identify one or more overlapping clones. The complete sequence may then be determined using standard techniques, which may involve generating a series of deletion clones. The resulting overlapping sequences can then assembled into a single contiguous sequence. A full length cDNA molecule can be generated by ligating suitable fragments, using well known techniques.

[0801] Alternatively, amplification techniques, such as those described above, can be useful for obtaining a full length coding sequence from a partial cDNA sequence. One such amplification technique is inverse PCR (see Triglia et al., Nucl. Acids Res. 16:8186, 1988), which uses restriction enzymes to generate a fragment in the known region of the gene. The fragment is then circularized by intramolecular ligation and used as a template for PCR with divergent primers derived from the known region. Within an alternative approach, sequences adjacent to a partial sequence may be retrieved by amplification with a primer to a linker sequence and a primer specific to a known region. The amplified sequences are typically subjected to a second round of amplification with the same linker primer and a second primer specific to the known region. A variation on this procedure, which employs two primers that initiate extension in opposite directions from the known sequence, is described in WO 96/38591. Another such technique is known as “rapid amplification of cDNA ends” or RACE. This technique involves the use of an internal primer and an external primer, which hybridizes to a polyA region or vector sequence, to identify sequences that are 5′ and 3′ of a known sequence. Additional techniques include capture PCR (Lagerstrom et al., PCR Methods Applic. 1:111-19, 1991) and walking PCR (Parker et al., Nucl. Acids. Res. 19:3055-60, 1991). Other methods employing amplification may also be employed to obtain a full length cDNA sequence.

[0802] In certain instances, it is possible to obtain a full length cDNA sequence by analysis of sequences provided in an expressed sequence tag (EST) database, such as that available from GenBank. Searches for overlapping ESTs may generally be performed using well known programs (e.g., NCBI BLAST searches), and such ESTs may be used to generate a contiguous full length sequence. Full length DNA sequences may also be obtained by analysis of genomic fragments.

[0803] In other embodiments of the invention, polynucleotide sequences or fragments thereof which encode polypeptides of the invention, or fusion proteins or functional equivalents thereof, may be used in recombinant DNA molecules to direct expression of a polypeptide in appropriate host cells. Due to the inherent degeneracy of the genetic code, other DNA sequences that encode substantially the same or a functionally equivalent amino acid sequence may be produced and these sequences may be used to clone and express a given polypeptide.

[0804] As will be understood by those of skill in the art, it may be advantageous in some instances to produce polypeptide-encoding nucleotide sequences possessing non-naturally occurring codons. For example, codons preferred by a particular prokaryotic or eukaryotic host can be selected to increase the rate of protein expression or to produce a recombinant RNA transcript having desirable properties, such as a half-life which is longer than that of a transcript generated from the naturally occurring sequence.

[0805] Moreover, the polynucleotide sequences of the present invention can be engineered using methods generally known in the art in order to alter polypeptide encoding sequences for a variety of reasons, including but not limited to, alterations which modify the cloning, processing, and/or expression of the gene product. For example, DNA shuffling by random fragmentation and PCR reassembly of gene fragments and synthetic oligonucleotides may be used to engineer the nucleotide sequences. In addition, site-directed mutagenesis may be used to insert new restriction sites, alter glycosylation patterns, change codon preference, produce splice variants, or introduce mutations, and so forth.

[0806] In another embodiment of the invention, natural, modified, or recombinant nucleic acid sequences may be ligated to a heterologous sequence to encode a fusion protein. For example, to screen peptide libraries for inhibitors of polypeptide activity, it may be useful to encode a chimeric protein that can be recognized by a commercially available antibody. A fusion protein may also be engineered to contain a cleavage site located between the polypeptide-encoding sequence and the heterologous protein sequence, so that the polypeptide may be cleaved and purified away from the heterologous moiety.

[0807] Sequences encoding a desired polypeptide may be synthesized, in whole or in part, using chemical methods well known in the art (see Caruthers, M. H. et al. (1980) Nucl. Acids Res. Symp. Ser. 215-223, Horn, T. et al. (1980) Nucl. Acids Res. Symp. Ser. 225-232). Alternatively, the protein itself may be produced using chemical methods to synthesize the amino acid sequence of a polypeptide, or a portion thereof. For example, peptide synthesis can be performed using various solid-phase techniques (Roberge, J. Y. et al. (1995) Science 269:202-204) and automated synthesis may be achieved, for example, using the ABI 431A Peptide Synthesizer (Perkin Elmer, Palo Alto, Calif.).

[0808] A newly synthesized peptide may be substantially purified by preparative high performance liquid chromatography (e.g., Creighton, T. (1983) Proteins, Structures and Molecular Principles, WH Freeman and Co., New York, N.Y.) or other comparable techniques available in the art. The composition of the synthetic peptides may be confirmed by amino acid analysis or sequencing (e.g., the Edman degradation procedure). Additionally, the amino acid sequence of a polypeptide, or any part thereof, may be altered during direct synthesis and/or combined using chemical methods with sequences from other proteins, or any part thereof, to produce a variant polypeptide.

[0809] In order to express a desired polypeptide, the nucleotide sequences encoding the polypeptide, or functional equivalents, may be inserted into appropriate expression vector, i.e., a vector which contains the necessary elements for the transcription and translation of the inserted coding sequence. Methods which are well known to those skilled in the art may be used to construct expression vectors containing sequences encoding a polypeptide of interest and appropriate transcriptional and translational control elements. These methods include in vitro recombinant DNA techniques, synthetic techniques, and in vivo genetic recombination. Such techniques are described, for example, in Sambrook, J. et al. (1989) Molecular Cloning, A Laboratory Manual, Cold Spring Harbor Press, Plainview, N.Y., and Ausubel, F. M. et al. (1989) Current Protocols in Molecular Biology, John Wiley & Sons, New York. N.Y.

[0810] A variety of expression vector/host systems may be utilized to contain and express polynucleotide sequences. These include, but are not limited to, microorganisms such as bacteria transformed with recombinant bacteriophage, plasmid, or cosmid DNA expression vectors; yeast transformed with yeast expression vectors; insect cell systems infected with virus expression vectors (e.g., baculovirus); plant cell systems transformed with virus expression vectors (e.g., cauliflower mosaic virus, CaMV; tobacco mosaic virus, TMV) or with bacterial expression vectors (e.g., Ti or pBR322 plasmids); or animal cell systems.

[0811] The “control elements” or “regulatory sequences” present in an expression vector are those non-translated regions of the vector—enhancers, promoters, 5′ and 3′ untranslated regions—which interact with host cellular proteins to carry out transcription and translation. Such elements may vary in their strength and specificity. Depending on the vector system and host utilized, any number of suitable transcription and translation elements, including constitutive and inducible promoters, may be used. For example, when cloning in bacterial systems, inducible promoters such as the hybrid lacZ promoter of the PBLUESCRIPT phagemid (Stratagene, La Jolla, Calif.) or PSPORT1 plasmid (Gibco BRL, Gaithersburg, Md.) and the like may be used. In mammalian cell systems, promoters from mammalian genes or from mammalian viruses are generally preferred. If it is necessary to generate a cell line that contains multiple copies of the sequence encoding a polypeptide, vectors based on SV40 or EBV may be advantageously used with an appropriate selectable marker.

[0812] In bacterial systems, any of a number of expression vectors may be selected depending upon the use intended for the expressed polypeptide. For example, when large quantities are needed, for example for the induction of antibodies, vectors which direct high level expression of fusion proteins that are readily purified may be used. Such vectors include, but are not limited to, the multifunctional E. coli cloning and expression vectors such as BLUESCRIPT (Stratagene), in which the sequence encoding the polypeptide of interest may be ligated into the vector in frame with sequences for the amino-terminal Met and the subsequent 7 residues of .beta.-galactosidase so that a hybrid protein is produced; pIN vectors (Van Heeke, G. and S. M. Schuster (1989) J. Biol. Chem. 264:5503-5509); and the like. pGEX Vectors (Promega, Madison, Wis.) may also be used to express foreign polypeptides as fusion proteins with glutathione S-transferase (GST). In general, such fusion proteins are soluble and can easily be purified from lysed cells by adsorption to glutathione-agarose beads followed by elution in the presence of free glutathione. Proteins made in such systems may be designed to include heparin, thrombin, or factor XA protease cleavage sites so that the cloned polypeptide of interest can be released from the GST moiety at will.

[0813] In the yeast, Saccharomyces cerevisiae, a number of vectors containing constitutive or inducible promoters such as alpha factor, alcohol oxidase, and PGH may be used. For reviews, see Ausubel et al. (supra) and Grant et al. (1987) Methods Enzymol. 153:516-544.

[0814] In cases where plant expression vectors are used, the expression of sequences encoding polypeptides may be driven by any of a number of promoters. For example, viral promoters such as the 35S and 19S promoters of CaMV may be used alone or in combination with the omega leader sequence from TMV (Takamatsu, N. (1987) EMBO J. 6:307-311. Alternatively, plant promoters such as the small subunit of RUBISCO or heat shock promoters may be used (Coruzzi, G. et al. (1984) EMBO J. 3:1671-1680; Broglie, R. et al. (1984) Science 224:838-843; and Winter, J. et al. (1991) Results Probl. Cell Differ. 17:85-105). These constructs can be introduced into plant cells by direct DNA transformation or pathogen-mediated transfection. Such techniques are described in a number of generally available reviews (see, for example, Hobbs, S. or Murry, L. E. in McGraw Hill Yearbook of Science and Technology (1992) McGraw Hill, New York, N.Y.; pp. 191-196).

[0815] An insect system may also be used to express a polypeptide of interest. For example, in one such system, Autographa californica nuclear polyhedrosis virus (AcNPV) is used as a vector to express foreign genes in Spodoptera frugiperda cells or in Trichoplusia larvae. The sequences encoding the polypeptide may be cloned into a non-essential region of the virus, such as the polyhedrin gene, and placed under control of the polyhedrin promoter. Successful insertion of the polypeptide-encoding sequence will render the polyhedrin gene inactive and produce recombinant virus lacking coat protein. The recombinant viruses may then be used to infect, for example, S. frugiperda cells or Trichoplusia larvae in which the polypeptide of interest may be expressed (Engelhard, E. K. et al. (1994) Proc. Natl. Acad. Sci. 91 :3224-3227).

[0816] In mammalian host cells, a number of viral-based expression systems are generally available. For example, in cases where an adenovirus is used as an expression vector, sequences encoding a polypeptide of interest may be ligated into an adenovirus transcription/translation complex consisting of the late promoter and tripartite leader sequence. Insertion in a non-essential E1 or E3 region of the viral genome may be used to obtain a viable virus which is capable of expressing the polypeptide in infected host cells (Logan, J. and Shenk, T. (1984) Proc. Natl. Acad. Sci. 81:3655-3659). In addition, transcription enhancers, such as the Rous sarcoma virus (RSV) enhancer, may be used to increase expression in mammalian host cells.

[0817] Specific initiation signals may also be used to achieve more efficient translation of sequences encoding a polypeptide of interest. Such signals include the ATG initiation codon and adjacent sequences. In cases where sequences encoding the polypeptide, its initiation codon, and upstream sequences are inserted into the appropriate expression vector, no additional transcriptional or translational control signals may be needed. However, in cases where only coding sequence, or a portion thereof, is inserted, exogenous translational control signals including the ATG initiation codon should be provided. Furthermore, the initiation codon should be in the correct reading frame to ensure translation of the entire insert. Exogenous translational elements and initiation codons may be of various origins, both natural and synthetic. The efficiency of expression may be enhanced by the inclusion of enhancers which are appropriate for the particular cell system which is used, such as those described in the literature (Scharf, D. et al. (1994) Results Probl. Cell Differ. 20:125-162).

[0818] In addition, a host cell strain may be chosen for its ability to modulate the expression of the inserted sequences or to process the expressed protein in the desired fashion. Such modifications of the polypeptide include, but are not limited to, acetylation, carboxylation. glycosylation, phosphorylation, lipidation, and acylation. Post-translational processing which cleaves a “prepro” form of the protein may also be used to facilitate correct insertion, folding and/or function. Different host cells such as CHO, COS, HeLa, MDCK, HEK293, and WI38, which have specific cellular machinery and characteristic mechanisms for such post-translational activities, may be chosen to ensure the correct modification and processing of the foreign protein.

[0819] For long-term, high-yield production of recombinant proteins, stable expression is generally preferred. For example, cell lines which stably express a polynucleotide of interest may be transformed using expression vectors which may contain viral origins of replication and/or endogenous expression elements and a selectable marker gene on the same or on a separate vector. Following the introduction of the vector, cells may be allowed to grow for 1-2 days in an enriched media before they are switched to selective media. The purpose of the selectable marker is to confer resistance to selection, and its presence allows growth and recovery of cells which successfully express the introduced sequences. Resistant clones of stably transformed cells may be proliferated using tissue culture techniques appropriate to the cell type.

[0820] Any number of selection systems may be used to recover transformed cell lines. These include, but are not limited to, the herpes simplex virus thymidine kinase (Wigler, M. et al. (1977) Cell 11:223-32) and adenine phosphoribosyltransferase (Lowy, I. et al. (1990) Cell 22:817-23) genes which can be employed in tk.sup.- or aprt.sup.-cells, respectively. Also, antimetabolite, antibiotic or herbicide resistance can be used as the basis for selection; for example, dhfr which confers resistance to methotrexate (Wigler, M. et al. (1980) Proc. Natl. Acad. Sci. 77:3567-70); npt, which confers resistance to the aminoglycosides, neomycin and G-418 (Colbere-Garapin, F. et al (1981) J. Mol. Biol. 150:1-14); and als or pat, which confer resistance to chlorsulfuron and phosphinotricin acetyltransferase, respectively (Murry, supra). Additional selectable genes have been described, for example, trpB, which allows cells to utilize indole in place of tryptophan, or hisD, which allows cells to utilize histinol in place of histidine (Hartman, S. C. and R. C. Mulligan (1988) Proc. Natl. Acad. Sci. 85:8047-51). The use of visible markers has gained popularity with such markers as anthocyanins, beta-glucuronidase and its substrate GUS, and luciferase and its substrate luciferin, being widely used not only to identify transformants, but also to quantify the amount of transient or stable protein expression attributable to a specific vector system (Rhodes, C. A. et al. (1995) Methods Mol. Biol. 55:121-131).

[0821] Although the presence/absence of marker gene expression suggests that the gene of interest is also present, its presence and expression may need to be confirmed. For example, if the sequence encoding a polypeptide is inserted within a marker gene sequence, recombinant cells containing sequences can be identified by the absence of marker gene function. Alternatively, a marker gene can be placed in tandem with a polypeptide-encoding sequence under the control of a single promoter. Expression of the marker gene in response to induction or selection usually indicates expression of the tandem gene as well.

[0822] Alternatively, host cells that contain and express a desired polynucleotide sequence may be identified by a variety of procedures known to those of skill in the art. These procedures include, but are not limited to, DNA-DNA or DNA-RNA hybridizations and protein bioassay or immunoassay techniques which include, for example, membrane, solution, or chip based technologies for the detection and/or quantification of nucleic acid or protein.

[0823] A variety of protocols for detecting and measuring the expression of polynucleotide-encoded products, using either polyclonal or monoclonal antibodies specific for the product are known in the art. Examples include enzyme-linked immunosorbent assay (ELISA), radioimmunoassay (RIA), and fluorescence activated cell sorting (FACS). A two-site, monoclonal-based immunoassay utilizing monoclonal antibodies reactive to two non-interfering epitopes on a given polypeptide may be preferred for some applications, but a competitive binding assay may also be employed. These and other assays are described, among other places, in Hampton, R. et al. (1990; Serological Methods, a Laboratory Manual, APS Press, St Paul. Minn.) and Maddox, D. E. et al. (1983; J. Exp. Med. 158:1211-1216).

[0824] A wide variety of labels and conjugation techniques are known by those skilled in the art and may be used in various nucleic acid and amino acid assays. Means for producing labeled hybridization or PCR probes for detecting sequences related to polynucleotides include oligolabeling, nick translation, end-labeling or PCR amplification using a labeled nucleotide. Alternatively, the sequences, or any portions thereof may be cloned into a vector for the production of an mRNA probe. Such vectors are known in the art, are commercially available, and may be used to synthesize RNA probes in vitro by addition of an appropriate RNA polymerase such as T7, T3, or SP6 and labeled nucleotides. These procedures may be conducted using a variety of commercially available kits. Suitable reporter molecules or labels, which may be used include radionuclides, enzymes, fluorescent, chemiluminescent, or chromogenic agents as well as substrates, cofactors, inhibitors, magnetic particles, and the like.

[0825] Host cells transformed with a polynucleotide sequence of interest may be cultured under conditions suitable for the expression and recovery of the protein from cell culture. The protein produced by a recombinant cell may be secreted or contained intracellularly depending on the sequence and/or the vector used. As will be understood by those of skill in the art, expression vectors containing polynucleotides of the invention may be designed to contain signal sequences which direct secretion of the encoded polypeptide through a prokaryotic or eukaryotic cell membrane. Other recombinant constructions may be used to join sequences encoding a polypeptide of interest to nucleotide sequence encoding a polypeptide domain which will facilitate purification of soluble proteins. Such purification facilitating domains include, but are not limited to, metal chelating peptides such as histidine-tryptophan modules that allow purification on immobilized metals, protein A domains that allow purification on immobilized immunoglobulin, and the domain utilized in the FLAGS extension/affinity purification system (Immunex Corp., Seattle, Wash.). The inclusion of cleavable linker sequences such as those specific for Factor XA or enterokinase (Invitrogen. San Diego, Calif.) between the purification domain and the encoded polypeptide may be used to facilitate purification. One such expression vector provides for expression of a fusion protein containing a polypeptide of interest and a nucleic acid encoding 6 histidine residues preceding a thioredoxin or an enterokinase cleavage site. The histidine residues facilitate purification on IMIAC (immobilized metal ion affinity chromatography) as described in Porath, J. et al. (1992, Prot. Exp. Purif. 3:263-281) while the enterokinase cleavage site provides a means for purifying the desired polypeptide from the fusion protein. A discussion of vectors which contain fusion proteins is provided in Kroll, D. J. et al. (1993; DNA Cell Biol. 12:441-453).

[0826] In addition to recombinant production methods, polypeptides of the invention, and fragments thereof, may be produced by direct peptide synthesis using solid-phase techniques (Merrifield J. (1963) J. Am. Chem. Soc. 85:2149-2154). Protein synthesis may be performed using manual techniques or by automation. Automated synthesis may be achieved, for example, using Applied Biosystems 431A Peptide Synthesizer (Perkin Elmer). Alternatively, various fragments may be chemically synthesized separately and combined using chemical methods to produce the full length molecule.

[0827] Antibody Compositions, Fragments Thereof and Other Binding Agents

[0828] According to another aspect, the present invention further provides binding agents, such as antibodies and antigen-binding fragments thereof, that exhibit immunological binding to a tumor polypeptide disclosed herein, or to a portion, variant or derivative thereof. An antibody, or antigen-binding fragment thereof, is said to “specifically bind,” “immunogically bind,” and/or is “immunologically reactive” to a polypeptide of the invention if it reacts at a detectable level (within, for example, an ELISA assay) with the polypeptide, and does not react detectably with unrelated polypeptides under similar conditions.

[0829] Immunological binding, as used in this context, generally refers to the non-covalent interactions of the type which occur between an immunoglobulin molecule and an antigen for which the immunoglobulin is specific. The strength, or affinity of immunological binding interactions can be expressed in terms of the dissociation constant (K_{d}) of the interaction, wherein a smaller K_{d} represents a greater affinity. Immunological binding properties of selected polypeptides can be quantified using methods well known in the art. One such method entails measuring the rates of antigen-binding site/antigen complex formation and dissociation, wherein those rates depend on the concentrations of the complex partners, the affinity of the interaction, and on geometric parameters that equally influence the rate in both directions. Thus, both the “on rate constant” (Kₒₙ) and the “off rate constant” (K_{off}) can be determined by calculation of the concentrations and the actual rates of association and dissociation. The ratio of K_{off}/Kₒₙ enables cancellation of all parameters not related to affinity, and is thus equal to the dissociation constant K_{d}. See, generally, Davies et al. (1990) Annual Rev. Biochem. 59:439-473.

[0830] An “antigen-binding site,” or “binding portion” of an antibody refers to the part of the immunoglobulin molecule that participates in antigen binding. The antigen binding site is formed by amino acid residues of the N-terminal variable (“V”) regions of the heavy (“H”) and light (“L”) chains. Three highly divergent stretches within the V regions of the heavy and light chains are referred to as “hypervariable regions” which are interposed between more conserved flanking stretches known as “framework regions,” or “FRs”. Thus the term “FR” refers to amino acid sequences which are naturally found between and adjacent to hypervariable regions in immunoglobulins. In an antibody molecule, the three hypervariable regions of a light chain and the three hypervariable regions of a heavy chain are disposed relative to each other in three dimensional space to form an antigen-binding surface. The antigen-binding surface is complementary to the three-dimensional surface of a bound antigen, and the three hypervariable regions of each of the heavy and light chains are referred to as “complementarity-determining regions,” or “CDRs.”

[0831] Binding agents may be further capable of differentiating between patients with and without a cancer, such as prostate cancer, using the representative assays provided herein. For example, antibodies or other binding agents that bind to a tumor protein will preferably generate a signal indicating the presence of a cancer in at least about 20% of patients with the disease, more preferably at least about 30% of patients. Alternatively, or in addition, the antibody will generate a negative signal indicating the absence of the disease in at least about 90% of individuals without the cancer. To determine whether a binding agent satisfies this requirement, biological samples (e.g., blood, sera, sputum, urine and/or tumor biopsies) from patients with and without a cancer (as determined using standard clinical tests) may be assayed as described herein for the presence of polypeptides that bind to the binding agent. Preferably, a statistically significant number of samples with and without the disease will be assayed. Each binding agent should satisfy the above criteria; however, those of ordinary skill in the art will recognize that binding agents may be used in combination to improve sensitivity.

[0832] Any agent that satisfies the above requirements may be a binding agent. For example, a binding agent may be a ribosome, with or without a peptide component, an RNA molecule or a polypeptide. In a preferred embodiment, a binding agent is an antibody or an antigen-binding fragment thereof. Antibodies may be prepared by any of a variety of techniques known to those of ordinary skill in the art. See, e.g., Harlow and Lane, Antibodies: A Laboratory Manual, Cold Spring Harbor Laboratory, 1988. In general, antibodies can be produced by cell culture techniques, including the generation of monoclonal antibodies as described herein, or via transfection of antibody genes into suitable bacterial or mammalian cell hosts, in order to allow for the production of recombinant antibodies. In one technique, an immunogen comprising the polypeptide is initially injected into any of a wide variety of mammals (e.g., mice, rats, rabbits, sheep or goats). In this step, the polypeptides of this invention may serve as the immunogen without modification. Alternatively, particularly for relatively short polypeptides, a superior immune response may be elicited if the polypeptide is joined to a carrier protein, such as bovine serum albumin or keyhole limpet hemocyanin. The immunogen is injected into the animal host, preferably according to a predetermined schedule incorporating one or more booster immunizations, and the animals are bled periodically. Polyclonal antibodies specific for the polypeptide may then be purified from such antisera by, for example, affinity chromatography using the polypeptide coupled to a suitable solid support.

[0833] Monoclonal antibodies specific for an antigenic polypeptide of interest may be prepared, for example, using the technique of Kohler and Milstein, Eur. J. Immunol. 6:511-519, 1976, and improvements thereto. Briefly, these methods involve the preparation of immortal cell lines capable of producing antibodies having the desired specificity (i.e., reactivity with the polypeptide of interest). Such cell lines may be produced, for example, from spleen cells obtained from an animal immunized as described above. The spleen cells are then immortalized by, for example, fusion with a myeloma cell fusion partner, preferably one that is syngeneic with the immunized animal. A variety of fusion techniques may be employed. For example, the spleen cells and myeloma cells may be combined with a nonionic detergent for a few minutes and then plated at low density on a selective medium that supports the growth of hybrid cells, but not myeloma cells. A preferred selection technique uses HAT (hypoxanthine, aminopterin, thymidine) selection. After a sufficient time, usually about 1 to 2 weeks, colonies of hybrids are observed. Single colonies are selected and their culture supernatants tested for binding activity against the polypeptide. Hybridomas having high reactivity and specificity are preferred.

[0834] Monoclonal antibodies may be isolated from the supernatants of growing hybridoma colonies. In addition, various techniques may be employed to enhance the yield, such as injection of the hybridoma cell line into the peritoneal cavity of a suitable vertebrate host, such as a mouse. Monoclonal antibodies may then be harvested from the ascites fluid or the blood. Contaminants may be removed from the antibodies by conventional techniques, such as chromatography, gel filtration, precipitation, and extraction. The polypeptides of this invention may be used in the purification process in, for example, an affinity chromatography step.

[0835] A number of therapeutically useful molecules are known in the art which comprise antigen-binding sites that are capable of exhibiting immunological binding properties of an antibody molecule. The proteolytic enzyme papain preferentially cleaves IgG molecules to yield several fragments, two of which (the “F(ab)” fragments) each comprise a covalent heterodimer that includes an intact antigen-binding site. The enzyme pepsin is able to cleave IgG molecules to provide several fragments, including the “F(ab′)₂” fragment which comprises both antigen-binding sites. An “Fv” fragment can be produced by preferential proteolytic cleavage of an IgM, and on rare occasions IgG or IgA immunoglobulin molecule. Fv fragments are, however, more commonly derived using recombinant techniques known in the art. The Fv fragment includes a non-covalent V_{H}::V_{L} heterodimer including an antigen-binding site which retains much of the antigen recognition and binding capabilities of the native antibody molecule. Inbar et al. (1972) Proc. Nat. Acad. Sci. USA 69:2659-2662; Hochman et al. (1976) Biochem 15:2706-2710; and Ehrlich et al. (1980) Biochem 19:4091-4096.

[0836] A single chain Fv (“sFv”) polypeptide is a covalently linked V_{H}::V_{L} heterodimer which is expressed from a gene fusion including V_{H}- and V_{L}-encoding genes linked by a peptide-encoding linker. Huston et al. (1988) Proc. Nat. Acad. Sci. USA 85(16):5879-5883. A number of methods have been described to discern chemical structures for converting the naturally aggregated—but chemically separated—light and heavy polypeptide chains from an antibody V region into an sFv molecule which will fold into a three dimensional structure substantially similar to the structure of an antigen-binding site. See, e.g., U.S. Pat. Nos. 5,091,513 and 5,132,405, to Huston et al.; and U.S. Pat. No. 4,946,778, to Ladner et al.

[0837] Each of the above-described molecules includes a heavy chain and a light chain CDR set, respectively interposed between a heavy chain and a light chain FR set which provide support to the CDRS and define the spatial relationship of the CDRs relative to each other. As used herein, the term “CDR set” refers to the three hypervariable regions of a heavy or light chain V region. Proceeding from the N-terminus of a heavy or light chain, these regions are denoted as “CDR1,” “CDR2,” and “CDR3” respectively. An antigen-binding site, therefore, includes six CDRs, comprising the CDR set from each of a heavy and a light chain V region. A polypeptide comprising a single CDR, (e.g., a CDR1, CDR2 or CDR3) is referred to herein as a “molecular recognition unit.” Crystallographic analysis of a number of antigen-antibody complexes has demonstrated that the amino acid residues of CDRs form extensive contact with bound antigen, wherein the most extensive antigen contact is with the heavy chain CDR3. Thus, the molecular recognition units are primarily responsible for the specificity of an antigen-binding site.

[0838] As used herein, the term “FR set” refers to the four flanking amino acid sequences which frame the CDRs of a CDR set of a heavy or light chain V region. Some FR residues may contact bound antigen; however, FRs are primarily responsible for folding the V region into the antigen-binding site, particularly the FR residues directly adjacent to the CDRS. Within FRs, certain amino residues and certain structural features are very highly conserved. In this regard, all V region sequences contain an internal disulfide loop of around 90 amino acid residues. When the V regions fold into a binding-site, the CDRs are displayed as projecting loop motifs which form an antigen-binding surface. It is generally recognized that there are conserved structural regions of FRs which influence the folded shape of the CDR loops into certain “canonical” structures—regardless of the precise CDR amino acid sequence. Further, certain FR residues are known to participate in non-covalent interdomain contacts which stabilize the interaction of the antibody heavy and light chains.

[0839] A number of “humanized” antibody molecules comprising an antigen-binding site derived from a non-human immunoglobulin have been described, including chimeric antibodies having rodent V regions and their associated CDRs fused to human constant domains (Winter et al. (1991) Nature 349:293-299; Lobuglio et al. (1989) Proc. Nat. Acad. Sci. USA 86:4220-4224; Shaw et al. (1987) J. Immunol. 138:4534-4538; and Brown et al. (1987) Cancer Res. 47:3577-3583), rodent CDRs grafted into a human supporting FR prior to fusion with an appropriate human antibody constant domain (Riechmann et al. (1988) Nature 332:323-327; Verhoeyen et al. (1988) Science 239:1534-1536; and Jones et al. (1986) Nature 321:522-525), and rodent CDRs supported by recombinantly veneered rodent FRs (European Patent Publication No. 519,596, published Dec. 23, 1992). These “humanized” molecules are designed to minimize unwanted immunological response toward rodent antihuman antibody molecules which limits the duration and effectiveness of therapeutic applications of those moieties in human recipients.

[0840] As used herein, the terms “veneered FRs” and “recombinantly veneered FRs” refer to the selective replacement of FR residues from, e.g., a rodent heavy or light chain V region, with human FR residues in order to provide a xenogeneic molecule comprising an antigen-binding site which retains substantially all of the native FR polypeptide folding structure. Veneering techniques are based on the understanding that the ligand binding characteristics of an antigen-binding site are determined primarily by the structure and relative disposition of the heavy and light chain CDR sets within the antigen-binding surface. Davies et al. (1990) Ann. Rev. Biochem. 59:439-473. Thus, antigen binding specificity can be preserved in a humanized antibody only wherein the CDR structures, their interaction with each other, and their interaction with the rest of the V region domains are carefully maintained. By using veneering techniques, exterior (e.g., solvent-accessible) FR residues which are readily encountered by the immune system are selectively replaced with human residues to provide a hybrid molecule that comprises either a weakly immunogenic, or substantially non-immunogenic veneered surface.

[0841] The process of veneering makes use of the available sequence data for human antibody variable domains compiled by Kabat et al., in Sequences of Proteins of Immunological Interest, 4th ed., (U.S. Dept. of Health and Human Services, U.S. Government Printing Office, 1987), updates to the Kabat database, and other accessible U.S. and foreign databases (both nucleic acid and protein). Solvent accessibilities of V region amino acids can be deduced from the known three-dimensional structure for human and murine antibody fragments. There are two general steps in veneering a murine antigen-binding site. Initially, the FRs of the variable domains of an antibody molecule of interest are compared with corresponding FR sequences of human variable domains obtained from the above-identified sources. The most homologous human V regions are then compared residue by residue to corresponding murine amino acids. The residues in the murine FR which differ from the human counterpart are replaced by the residues present in the human moiety using recombinant techniques well known in the art. Residue switching is only carried out with moieties which are at least partially exposed (solvent accessible), and care is exercised in the replacement of amino acid residues which may have a significant effect on the tertiary structure of V region domains, such as proline, glycine and charged amino acids.

[0842] In this manner, the resultant “veneered” murine antigen-binding sites are thus designed to retain the murine CDR residues, the residues substantially adjacent to the CDRs, the residues identified as buried or mostly buried (solvent inaccessible), the residues believed to participate in non-covalent (e.g., electrostatic and hydrophobic) contacts between heavy and light chain domains, and the residues from conserved structural regions of the FRs which are believed to influence the “canonical” tertiary structures of the CDR loops. These design criteria are then used to prepare recombinant nucleotide sequences which combine the CDRs of both the heavy and light chain of a murine antigen-binding site into human-appearing FRs that can be used to transfect mammalian cells for the expression of recombinant human antibodies which exhibit the antigen specificity of the murine antibody molecule.

[0843] In another embodiment of the invention, monoclonal antibodies of the present invention may be coupled to one or more therapeutic agents. Suitable agents in this regard include radionuclides, differentiation inducers, drugs, toxins, and derivatives thereof Preferred radionuclides include ⁹⁰Y, ¹²³I, ¹²⁵I, ¹³¹I, ¹⁸⁶Re, ¹⁸⁸Re, ²¹¹At, and ²¹²Bi. Preferred drugs include methotrexate, and pyrimidine and purine analogs. Preferred differentiation inducers include phorbol esters and butyric acid. Preferred toxins include ricin, abrin, diptheria toxin, cholera toxin, gelonin, Pseudomonas exotoxin, Shigella toxin, and pokeweed antiviral protein.

[0844] A therapeutic agent may be coupled (e.g., covalently bonded) to a suitable monoclonal antibody either directly or indirectly (e.g., via a linker group). A direct reaction between an agent and an antibody is possible when each possesses a substituent capable of reacting with the other. For example, a nucleophilic group, such as an amino or sulfhydryl group, on one may be capable of reacting with a carbonyl-containing group, such as an anhydride or an acid halide, or with an alkyl group containing a good leaving group (e.g., a halide) on the other.

[0845] Alternatively, it may be desirable to couple a therapeutic agent and an antibody via a linker group. A linker group can function as a spacer to distance an antibody from an agent in order to avoid interference with binding capabilities. A linker group can also serve to increase the chemical reactivity of a substituent on an agent or an antibody, and thus increase the coupling efficiency. An increase in chemical reactivity may also facilitate the use of agents, or functional groups on agents, which otherwise would not be possible.

[0846] It will be evident to those skilled in the art that a variety of bifunctional or polyfunctional reagents, both homo- and hetero-functional (such as those described in the catalog of the Pierce Chemical Co., Rockford, Ill.), may be employed as the linker group. Coupling may be effected, for example, through amino groups, carboxyl groups, sulfhydryl groups or oxidized carbohydrate residues. There are numerous references describing such methodology, e.g., U.S. Pat. No. 4,671,958, to Rodwell et al.

[0847] Where a therapeutic agent is more potent when free from the antibody portion of the immunoconjugates of the present invention, it may be desirable to use a linker group which is cleavable during or upon internalization into a cell. A number of different cleavable linker groups have been described. The mechanisms for the intracellular release of an agent from these linker groups include cleavage by reduction of a disulfide bond (e.g., U.S. Pat. No. 4,489,710, to Spitler), by irradiation of a photolabile bond (e.g., U.S. Pat. No. 4,625,014, to Senter et al.), by hydrolysis of derivatized amino acid side chains (e.g., U.S. Pat. No. 4,638,045, to Kohn et al.), by serum complement-mediated hydrolysis (e.g., U.S. Pat. No. 4,671,958, to Rodwell et al.), and acid-catalyzed hydrolysis (e.g., U.S. Pat. No. 4,569,789, to Blattler et al.).

[0848] It may be desirable to couple more than one agent to an antibody. In one embodiment, multiple molecules of an agent are coupled to one antibody molecule. In another embodiment, more than one type of agent may be coupled to one antibody. Regardless of the particular embodiment, immunoconjugates with more than one agent may be prepared in a variety of ways. For example, more than one agent may be coupled directly to an antibody molecule, or linkers that provide multiple sites for attachment can be used. Alternatively, a carrier can be used.

[0849] A carrier may bear the agents in a variety of ways, including covalent bonding either directly or via a linker group. Suitable carriers include proteins such as albumins (e.g., U.S. Pat. No. 4,507,234, to Kato et al.), peptides and polysaccharides such as aminodextran (e.g., U.S. Pat. No. 4,699,784, to Shih et al.). A carrier may also bear an agent by noncovalent bonding or by encapsulation, such as within a liposome vesicle (e.g., U.S. Pat. Nos. 4,429,008 and 4,873,088). Carriers specific for radionuclide agents include radiohalogenated small molecules and chelating compounds. For example, U.S. Pat. No. 4,735,792 discloses representative radiohalogenated small molecules and their synthesis. A radionuclide chelate may be formed from chelating compounds that include those containing nitrogen and sulfur atoms as the donor atoms for binding the metal, or metal oxide, radionuclide. For example, U.S. Pat. No. 4,673,562, to Davison et al. discloses representative chelating compounds and their synthesis.

[0850] T Cell Compositions

[0851] The present invention, in another aspect, provides T cells specific for a tumor polypeptide disclosed herein, or for a variant or derivative thereof. Such cells may generally be prepared in vitro or ex vivo, using standard procedures. For example, T cells may be isolated from bone marrow, peripheral blood, or a fraction of bone marrow or peripheral blood of a patient, using a commercially available cell separation system, such as the Isolex™ System, available from Nexell Therapeutics, Inc. (Irvine, Calif.; see also U.S. Pat. No. 5,240,856; U.S. Pat. No. 5,215,926; WO 89/06280; WO 91/16116 and WO 92/07243). Alternatively, T cells may be derived from related or unrelated humans, non-human mammals, cell lines or cultures.

[0852] T cells may be stimulated with a polypeptide, polynucleotide encoding a polypeptide and/or an antigen presenting cell (APC) that expresses such a polypeptide. Such stimulation is performed under conditions and for a time sufficient to permit the generation of T cells that are specific for the polypeptide of interest. Preferably, a tumor polypeptide or polynucleotide of the invention is present within a delivery vehicle, such as a microsphere, to facilitate the generation of specific T cells.

[0853] T cells are considered to be specific for a polypeptide of the present invention if the T cells specifically proliferate, secrete cytokines or kill target cells coated with the polypeptide or expressing a gene encoding the polypeptide. T cell specificity may be evaluated using any of a variety of standard techniques. For example, within a chromium release assay or proliferation assay, a stimulation index of more than two fold increase in lysis and/or proliferation, compared to negative controls, indicates T cell specificity. Such assays may be performed, for example, as described in Chen et al., Cancer Res. 54:1065-1070, 1994. Alternatively, detection of the proliferation of T cells may be accomplished by a variety of known techniques. For example, T cell proliferation can be detected by measuring an increased rate of DNA synthesis (e.g., by pulse-labeling cultures of T cells with tritiated thymidine and measuring the amount of tritiated thymidine incorporated into DNA). Contact with a tumor polypeptide (100 ng/ml -100 μg/ml, preferably 200 ng/ml-25 μg/ml) for 3-7 days will typically result in at least a two fold increase in proliferation of the T cells. Contact as described above for 2-3 hours should result in activation of the T cells, as measured using standard cytokine assays in which a two fold increase in the level of cytokine release (e.g., TNF or IFN-γ) is indicative of T cell activation (see Coligan et al., Current Protocols in Immunology, vol. 1, Wiley Interscience (Greene 1998)). T cells that have been activated in response to a tumor polypeptide, polynucleotide or polypeptide-expressing APC may be CD4⁺ and/or CD8⁺. Tumor polypeptide-specific T cells may be expanded using standard techniques. Within preferred embodiments, the T cells are derived from a patient, a related donor or an unrelated donor, and are administered to the patient following stimulation and expansion.

[0854] For therapeutic purposes, CD4⁺ or CD8⁺ T cells that proliferate in response to a tumor polypeptide, polynucleotide or APC can be expanded in number either in vitro or in vivo. Proliferation of such T cells in vitro may be accomplished in a variety of ways. For example, the T cells can be re-exposed to a tumor polypeptide, or a short peptide corresponding to an immunogenic portion of such a polypeptide, with or without the addition of T cell growth factors, such as interleukin-2, and/or stimulator cells that synthesize a tumor polypeptide. Alternatively, one or more T cells that proliferate in the presence of the tumor polypeptide can be expanded in number by cloning. Methods for cloning cells are well known in the art, and include limiting dilution.

[0855] Pharmaceutical Compositions

[0856] In additional embodiments, the present invention concerns formulation of one or more of the polynucleotide, polypeptide, T-cell and/or antibody compositions disclosed herein in pharmaceutically-acceptable carriers for administration to a cell or an animal, either alone, or in combination with one or more other modalities of therapy.

[0857] It will be understood that, if desired, a composition as disclosed herein may be administered in combination with other agents as well, such as, e.g., other proteins or polypeptides or various pharmaceutically-active agents. In fact, there is virtually no limit to other components that may also be included, given that the additional agents do not cause a significant adverse effect upon contact with the target cells or host tissues. The compositions may thus be delivered along with various other agents as required in the particular instance. Such compositions may be purified from host cells or other biological sources, or alternatively may be chemically synthesized as described herein. Likewise, such compositions may further comprise substituted or derivatized RNA or DNA compositions.

[0858] Therefore, in another aspect of the present invention, pharmaceutical compositions are provided comprising one or more of the polynucleotide, polypeptide, antibody, and/or T-cell compositions described herein in combination with a physiologically acceptable carrier. In certain preferred embodiments, the pharmaceutical compositions of the invention comprise immunogenic polynucleotide and/or polypeptide compositions of the invention for use in prophylactic and theraputic vaccine applications. Vaccine preparation is generally described in, for example, M. F. Powell and M. J. Newman, eds., “Vaccine Design (the subunit and adjuvant approach),” Plenum Press (NY, 1995). Generally, such compositions will comprise one or more polynucleotide and/or polypeptide compositions of the present invention in combination with one or more immunostimulants.

[0859] It will be apparent that any of the pharmaceutical compositions described herein can contain pharmaceutically acceptable salts of the polynucleotides and polypeptides of the invention. Such salts can be prepared, for example, from pharmaceutically acceptable non-toxic bases, including organic bases (e.g., salts of primary, secondary and tertiary amines and basic amino acids) and inorganic bases (e.g., sodium, potassium, lithium, ammonium, calcium and magnesium salts).

[0860] In another embodiment, illustrative immunogenic compositions, e.g., vaccine compositions, of the present invention comprise DNA encoding one or more of the polypeptides as described above, such that the polypeptide is generated in situ. As noted above, the polynucleotide may be administered within any of a variety of delivery systems known to those of ordinary skill in the art. Indeed, numerous gene delivery techniques are well known in the art, such as those described by Rolland, Crit. Rev. Therap. Drug Carrier Systems 15:143-198, 1998, and references cited therein. Appropriate polynucleotide expression systems will, of course, contain the necessary regulatory DNA regulatory sequences for expression in a patient (such as a suitable promoter and terminating signal). Alternatively, bacterial delivery systems may involve the administration of a bacterium (such as Bacillus-Calmette-Guerrin) that expresses an immunogenic portion of the polypeptide on its cell surface or secretes such an epitope.

[0861] Therefore, in certain embodiments, polynucleotides encoding immunogenic polypeptides described herein are introduced into suitable mammalian host cells for expression using any of a number of known viral-based systems. In one illustrative embodiment, retroviruses provide a convenient and effective platform for gene delivery systems. A selected nucleotide sequence encoding a polypeptide of the present invention can be inserted into a vector and packaged in retroviral particles using techniques known in the art. The recombinant virus can then be isolated and delivered to a subject. A number of illustrative retroviral systems have been described (e.g., U.S. Pat. No. 5,219,740; Miller and Rosman (1989) BioTechniques 7:980-990; Miller, A. D. (1990) Human Gene Therapy 1:5-14; Scarpa et al. (1991) Virology 180:849-852; Burns et al. (1993) Proc. Natl. Acad. Sci. USA 90:8033-8037; and Boris-Lawrie and Temin (1993) Cur. Opin. Genet. Develop. 3:102-109.

[0862] In addition, a number of illustrative adenovirus-based systems have also been described. Unlike retroviruses which integrate into the host genome, adenoviruses persist extrachromosomally thus minimizing the risks associated with insertional mutagenesis (Haj-Ahmad and Graham (1986) J. Virol. 57:267-274; Bett et al. (1993) J. Virol. 67:5911-5921; Mittereder et al. (1994) Human Gene Therapy 5:717-729; Seth et al. (1994) J. Virol. 68:933-940; Barr et al. (1994) Gene Therapy 1:51-58; Berkner, K. L. (1988) BioTechniques 6:616-629; and Rich et al. (1993) Human Gene Therapy 4:461-476).

[0863] Various adeno-associated virus (AAV) vector systems have also been developed for polynucleotide delivery. AAV vectors can be readily constructed using techniques well known in the art. See, e.g., U.S. Pat. Nos. 5,173,414 and 5,139,941; International Publication Nos. WO 92/01070 and WO 93/03769; Lebkowski et al. (1988) Molec. Cell. Biol. 8:3988-3996; Vincent et al. (1990) Vaccines 90 (Cold Spring Harbor Laboratory Press); Carter, B. J. (1992) Current Opinion in Biotechnology 3:533-539; Muzyczka, N. (1992) Current Topics in Microbiol. and Immunol. 158:97-129; Kotin, R. M. (1994) Human Gene Therapy 5:793-801; Shelling and Smith (1994) Gene Therapy 1:165-169; and Zhou et al. (1994) J. Exp. Med. 179:1867-1875.

[0864] Additional viral vectors useful for delivering the polynucleotides encoding polypeptides of the present invention by gene transfer include those derived from the pox family of viruses, such as vaccinia virus and avian poxvirus. By way of example, vaccinia virus recombinants expressing the novel molecules can be constructed as follows. The DNA encoding a polypeptide is first inserted into an appropriate vector so that it is adjacent to a vaccinia promoter and flanking vaccinia DNA sequences, such as the sequence encoding thymidine kinase (TK). This vector is then used to transfect cells which are simultaneously infected with vaccinia. Homologous recombination serves to insert the vaccinia promoter plus the gene encoding the polypeptide of interest into the viral genome. The resulting TK.sup.(−) recombinant can be selected by culturing the cells in the presence of 5-bromodeoxyuridine and picking viral plaques resistant thereto.

[0865] A vaccinia-based infection/transfection system can be conveniently used to provide for inducible, transient expression or coexpression of one or more polypeptides described herein in host cells of an organism. In this particular system, cells are first infected in vitro with a vaccinia virus recombinant that encodes the bacteriophage T7 RNA polymerase. This polymerase displays exquisite specificity in that it only transcribes templates bearing T7 promoters. Following infection, cells are transfected with the polynucleotide or polynucleotides of interest, driven by a T7 promoter. The polymerase expressed in the cytoplasm from the vaccinia virus recombinant transcribes the transfected DNA into RNA which is then translated into polypeptide by the host translational machinery. The method provides for high level, transient, cytoplasmic production of large quantities of RNA and its translation products. See, e.g., Elroy-Stein and Moss, Proc. Natl. Acad. Sci. USA (1990) 87:6743-6747; Fuerst et al. Proc. Natl. Acad. Sci. USA (1986) 83:8122-8126.

[0866] Alternatively, avipoxviruses, such as the fowlpox and canarypox viruses, can also be used to deliver the coding sequences of interest. Recombinant avipox viruses, expressing immunogens from mammalian pathogens, are known to confer protective immunity when administered to non-avian species. The use of an Avipox vector is particularly desirable in human and other mammalian species since members of the Avipox genus can only productively replicate in susceptible avian species and therefore are not infective in mammalian cells. Methods for producing recombinant Avipoxviruses are known in the art and employ genetic recombination, as described above with respect to the production of vaccinia viruses. See, e.g., WO 91/12882; WO 89/03429; and WO 92/03545.

[0867] Any of a number of alphavirus vectors can also be used for delivery of polynucleotide compositions of the present invention, such as those vectors described in U.S. Pat. Nos. 5,843,723; 6,015,686; 6,008,035 and 6,015,694. Certain vectors based on Venezuelan Equine Encephalitis (VEE) can also be used, illustrative examples of which can be found in U.S. Pat. Nos. 5,505,947 and 5,643,576.

[0868] Moreover, molecular conjugate vectors, such as the adenovirus chimeric vectors described in Michael et al. J. Biol. Chem. (1993) 268:6866-6869 and Wagner et al. Proc. Natl. Acad. Sci. USA (1992) 89:6099-6103, can also be used for gene delivery under the invention.

[0869] Additional illustrative information on these and other known viral-based delivery systems can be found, for example, in Fisher-Hoch et al., Proc. Natl. Acad. Sci. USA 86:317-321, 1989; Flexner et al., Ann. N.Y. Acad. Sci. 569:86-103, 1989; Flexner et al., Vaccine 8:17-21, 1990; U.S. Pat. Nos. 4,603,112, 4,769,330, and 5,017,487; WO 89/01973; U.S. Pat. No. 4,777,127; GB 2,200,651; EP 0,345,242; WO 91/02805; Berkner, Biotechniques 6:616-627, 1988; Rosenfeld et al., Science 252:431-434, 1991; Kolls et al., Proc. Natl. Acad. Sci. USA 91:215-219, 1994; Kass-Eisler et al., Proc. Natl. Acad. Sci. USA 90:11498-11502, 1993; Guzman et al., Circulation 88:2838-2848, 1993; and Guzman et al., Cir. Res. 73:1202-1207, 1993.

[0870] In certain embodiments, a polynucleotide may be integrated into the genome of a target cell. This integration may be in a specific location and orientation via homologous recombination (gene replacement) or it may be integrated in a random, non-specific location (gene augmentation). In yet further embodiments, the polynucleotide may be stably maintained in the cell as a separate, episomal segment of DNA. Such polynucleotide segments or “episomes” encode sequences sufficient to permit maintenance and replication independent of or in synchronization with the host cell cycle. The manner in which the expression construct is delivered to a cell and where in the cell the polynucleotide remains is dependent on the type of expression construct employed.

[0871] In another embodiment of the invention, a polynucleotide is administered/delivered as “naked” DNA, for example as described in Ulmer et al., Science 259:1745-1749, 1993 and reviewed by Cohen, Science 259:1691-1692, 1993. The uptake of naked DNA may be increased by coating the DNA onto biodegradable beads, which are efficiently transported into the cells.

[0872] In still another embodiment, a composition of the present invention can be delivered via a particle bombardment approach, many of which have been described. In one illustrative example, gas-driven particle acceleration can be achieved with devices such as those manufactured by Powderject Pharmaceuticals PLC (Oxford, UK) and Powderject Vaccines Inc. (Madison, Wis.), some examples of which are described in U.S. Pat. Nos. 5,846,796; 6,010,478; 5,865,796; 5,584,807; and EP Patent No. 0500 799. This approach offers a needle-free delivery approach wherein a dry powder formulation of microscopic particles, such as polynucleotide or polypeptide particles, are accelerated to high speed within a helium gas jet generated by a hand held device, propelling the particles into a target tissue of interest.

[0873] In a related embodiment, other devices and methods that may be useful for gas-driven needle-less injection of compositions of the present invention include those provided by Bioject, Inc. (Portland, Oreg.), some examples of which are described in U.S. Pat. Nos. 4,790,824; 5,064,413; 5,312,335; 5,383,851; 5,399,163; 5,520,639 and 5,993,412.

[0874] According to another embodiment, the pharmaceutical compositions described herein will comprise one or more immunostimulants in addition to the immunogenic polynucleotide, polypeptide, antibody, T-cell and/or APC compositions of this invention. An immunostimulant refers to essentially any substance that enhances or potentiates an immune response (antibody and/or cell-mediated) to an exogenous antigen. One preferred type of immunostimulant comprises an adjuvant. Many adjuvants contain a substance designed to protect the antigen from rapid catabolism, such as aluminum hydroxide or mineral oil, and a stimulator of immune responses, such as lipid A, Bortadella pertussis or Mycobacterium tuberculosis derived proteins. Certain adjuvants are commercially available as, for example, Freund's Incomplete Adjuvant and Complete Adjuvant (Difco Laboratories, Detroit, Mich.); Merck Adjuvant 65 (Merck and Company, Inc., Rahway, N.J.); AS-2 (SmithKline Beecham, Philadelphia, Pa.); aluminum salts such as aluminum hydroxide gel (alum) or aluminum phosphate; salts of calcium, iron or zinc; an insoluble suspension of acylated tyrosine; acylated sugars; cationically or anionically derivatized polysaccharides; polyphosphazenes; biodegradable microspheres; monophosphoryl lipid A and quil A. Cytokines, such as GM-CSF, interleukin-2,-7,-12, and other like growth factors, may also be used as adjuvants.

[0875] Within certain embodiments of the invention, the adjuvant composition is preferably one that induces an immune response predominantly of the Thl type. High levels of Th1-type cytokines (e.g., IFN-γ, TNFα, IL-2 and IL-12) tend to favor the induction of cell mediated immune responses to an administered antigen. In contrast, high levels of Th2-type cytokines (e.g. IL-4, IL-5, IL-6 and IL-10) tend to favor the induction of humoral immune responses. Following application of a vaccine as provided herein, a patient will support an immune response that includes Th1- and Th2-type responses. Within a preferred embodiment, in which a response is predominantly Th1-type, the level of Th1-type cytokines will increase to a greater extent than the level of Th2-type cytokines. The levels of these cytokines may be readily assessed using standard assays. For a review of the families of cytokines, see Mosmann and Coffman, Ann. Rev. Immunol. 7:145-173, 1989.

[0876] Certain preferred adjuvants for eliciting a predominantly Th1-type response include, for example, a combination of monophosphoryl lipid A, preferably 3-de-O-acylated monophosphoryl lipid A, together with an aluminum salt. MPL® adjuvants are available from Corixa Corporation (Seattle, Wash.; see, for example, U.S. Pat. Nos. 4,436,727; 4,877,611; 4,866,034 and 4,912,094). CpG-containing oligonucleotides (in which the CpG dinucleotide is unmethylated) also induce a predominantly Th1 response. Such oligonucleotides are well known and are described, for example, in WO 96/02555, WO 99/33488 and U.S. Pat. Nos. 6,008,200 and 5,856,462. Immunostimulatory DNA sequences are also described, for example, by Sato et al., Science 273:352, 1996. Another preferred adjuvant comprises a saponin, such as Quil A, or derivatives thereof, including QS21 and QS7 (Aquila Biopharmaceuticals Inc., Framingham, Mass.); Escin; Digitonin; or Gypsophila or Chenopodium quinoa saponins. Other preferred formulations include more than one saponin in the adjuvant combinations of the present invention, for example combinations of at least two of the following group comprising QS21, QS7, Quil A, β-escin, or digitonin.

[0877] Alternatively the saponin formulations may be combined with vaccine vehicles composed of chitosan or other polycationic polymers, polylactide and polylactide-co-glycolide particles, poly-N-acetyl glucosamine-based polymer matrix, particles composed of polysaccharides or chemically modified polysaccharides, liposomes and lipid-based particles, particles composed of glycerol monoesters, etc. The saponins may also be formulated in the presence of cholesterol to form particulate structures such as liposomes or ISCOMs. Furthermore, the saponins may be formulated together with a polyoxyethylene ether or ester, in either a non-particulate solution or suspension, or in a particulate structure such as a paucilamelar liposome or ISCOM. The saponins may also be formulated with excipients such as Carbopol^{R} to increase viscosity, or may be formulated in a dry powder form with a powder excipient such as lactose.

[0878] In one preferred embodiment, the adjuvant system includes the combination of a monophosphoryl lipid A and a saponin derivative, such as the combination of QS21 and 3D-MPL® adjuvant, as described in WO 94/00153, or a less reactogenic composition where the QS21 is quenched with cholesterol, as described in WO 96/33739. Other preferred formulations comprise an oil-in-water emulsion and tocopherol. Another particularly preferred adjuvant formulation employing QS21, 3D-MPL® adjuvant and tocopherol in an oil-in-water emulsion is described in WO 95/17210.

[0879] Another enhanced adjuvant system involves the combination of a CpG-containing oligonucleotide and a saponin derivative particularly the combination of CpG and QS21 is disclosed in WO 00/09159. Preferably the formulation additionally comprises an oil in water emulsion and tocopherol.

[0880] Additional illustrative adjuvants for use in the pharmaceutical compositions of the invention include Montanide ISA 720 (Seppic, France), SAF (Chiron, Calif., United States), ISCOMS (CSL), MF-59 (Chiron), the SBAS series of adjuvants (e.g., SBAS-2 or SBAS-4, available from SmithKline Beecham, Rixensart, Belgium), Detox (Enhanzyn®; Corixa, Hamilton, Mont.), RC-529 (Corixa, Hamilton, Mont.) and other aminoalkyl glucosaminide 4-phosphates (AGPs), such as those described in pending U.S. patent application Ser. Nos. 08/853,826 and 09/074,720, the disclosures of which are incorporated herein by reference in their entireties, and polyoxyethylene ether adjuvants such as those described in WO 99/52549A1.

[0881] Other preferred adjuvants include adjuvant molecules of the general formula

(I): HO(CH₂CH₂O)ₙ—A—R,

[0882] wherein, n is 1-50, A is a bond or —C(O)—, R is C₁₋₅₀ alkyl or Phenyl C₁₋₅₀ alkyl.

[0883] One embodiment of the present invention consists of a vaccine formulation comprising a polyoxyethylene ether of general formula (I), wherein n is between 1 and 50, preferably 4-24, most preferably 9; the R component is C₁₋₅₀, preferably C₄-C₂₀ alkyl and most preferably C₁₂ alkyl, and A is a bond. The concentration of the polyoxyethylene ethers should be in the range 0.1-20%, preferably from 0.1-10%, and most preferably in the range 0.1-1%. Preferred polyoxyethylene ethers are selected from the following group: polyoxyethylene-9-lauryl ether, polyoxyethylene-9-steoryl ether, polyoxyethylene-8-steoryl ether, polyoxyethylene-4-lauryl ether, polyoxyethylene-35-lauryl ether, and polyoxyethylene-23-lauryl ether. Polyoxyethylene ethers such as polyoxyethylene lauryl ether are described in the Merck index (12^{th} edition: entry 7717). These adjuvant molecules are described in WO 99/52549. The polyoxyethylene ether according to the general formula (I) above may, if desired, be combined with another adjuvant. For example, a preferred adjuvant combination is preferably with CpG as described in the pending UK patent application GB 9820956.2.

[0884] According to another embodiment of this invention, an immunogenic composition described herein is delivered to a host via antigen presenting cells (APCs), such as dendritic cells, macrophages, B cells, monocytes and other cells that may be engineered to be efficient APCs. Such cells may, but need not, be genetically modified to increase the capacity for presenting the antigen, to improve activation and/or maintenance of the T cell response, to have anti-tumor effects per se and/or to be immunologically compatible with the receiver (i.e., matched HLA haplotype). APCs may generally be isolated from any of a variety of biological fluids and organs, including tumor and peritumoral tissues, and may be autologous, allogeneic, syngeneic or xenogeneic cells.

[0885] Certain preferred embodiments of the present invention use dendritic cells or progenitors thereof as antigen-presenting cells. Dendritic cells are highly potent APCs (Banchereau and Steinman, Nature 392:245-251, 1998) and have been shown to be effective as a physiological adjuvant for eliciting prophylactic or therapeutic antitumor immunity (see Timmerman and Levy, Ann. Rev. Med. 50:507-529, 1999). In general, dendritic cells may be identified based on their typical shape (stellate in situ, with marked cytoplasmic processes (dendrites) visible in vitro), their ability to take up, process and present antigens with high efficiency and their ability to activate naive T cell responses. Dendritic cells may, of course, be engineered to express specific cell-surface receptors or ligands that are not commonly found on dendritic cells in vivo or ex vivo, and such modified dendritic cells are contemplated by the present invention. As an alternative to dendritic cells, secreted vesicles antigen-loaded dendritic cells (called exosomes) may be used within a vaccine (see Zitvogel et al., Nature Med. 4:594-600, 1998).

[0886] Dendritic cells and progenitors may be obtained from peripheral blood, bone marrow, tumor-infiltrating cells, peritumoral tissues-infiltrating cells, lymph nodes, spleen, skin, umbilical cord blood or any other suitable tissue or fluid. For example, dendritic cells may be differentiated ex vivo by adding a combination of cytokines such as GM-CSF, IL-4, IL-13 and/or TNFα. to cultures of monocytes harvested from peripheral blood. Alternatively, CD34 positive cells harvested from peripheral blood, umbilical cord blood or bone marrow may be differentiated into dendritic cells by adding to the culture medium combinations of GM-CSF, IL-3, TNFα, CD40 ligand, LPS, flt3 ligand and/or other compound(s) that induce differentiation, maturation and proliferation of dendritic cells.

[0887] Dendritic cells are conveniently categorized as “immature” and “mature” cells, which allows a simple way to discriminate between two well characterized phenotypes. However, this nomenclature should not be construed to exclude all possible intermediate stages of differentiation. Immature dendritic cells are characterized as APC with a high capacity for antigen uptake and processing, which correlates with the high expression of Fcγ receptor and mannose receptor. The mature phenotype is typically characterized by a lower expression of these markers, but a high expression of cell surface molecules responsible for T cell activation such as class I and class II MHC, adhesion molecules (e.g., CD54 and CD11) and costimulatory molecules (e.g., CD40, CD80, CD86 and 4-1BB).

[0888] APCs may generally be transfected with a polynucleotide of the invention (or portion or other variant thereof) such that the encoded polypeptide, or an immunogenic portion thereof, is expressed on the cell surface. Such transfection may take place ex vivo, and a pharmaceutical composition comprising such transfected cells may then be used for therapeutic purposes, as described herein. Alternatively, a gene delivery vehicle that targets a dendritic or other antigen presenting cell may be administered to a patient, resulting in transfection that occurs in vivo. In vivo and ex vivo transfection of dendritic cells, for example, may generally be performed using any methods known in the art, such as those described in WO 97/24447, or the gene gun approach described by Mahvi et al., Immunology and cell Biology 75:456-460, 1997. Antigen loading of dendritic cells may be achieved by incubating dendritic cells or progenitor cells with the tumor polypeptide, DNA (naked or within a plasmid vector) or RNA; or with antigen-expressing recombinant bacterium or viruses (e.g., vaccinia, fowlpox, adenovirus or lentivirus vectors). Prior to loading, the polypeptide may be covalently conjugated to an immunological partner that provides T cell help (e.g., a carrier molecule). Alternatively, a dendritic cell may be pulsed with a non-conjugated immunological partner, separately or in the presence of the polypeptide.

[0889] While any suitable carrier known to those of ordinary skill in the art may be employed in the pharmaceutical compositions of this invention, the type of carrier will typically vary depending on the mode of administration. Compositions of the present invention may be formulated for any appropriate manner of administration, including for example, topical, oral, nasal, mucosal, intravenous, intracranial, intraperitoneal, subcutaneous and intramuscular administration.

[0890] Carriers for use within such pharmaceutical compositions are biocompatible, and may also be biodegradable. In certain embodiments, the formulation preferably provides a relatively constant level of active component release. In other embodiments, however, a more rapid rate of release immediately upon administration may be desired. The formulation of such compositions is well within the level of ordinary skill in the art using known techniques. Illustrative carriers useful in this regard include microparticles of poly(lactide-co-glycolide), polyacrylate, latex, starch, cellulose, dextran and the like. Other illustrative delayed-release carriers include supramolecular biovectors, which comprise a non-liquid hydrophilic core (e.g., a cross-linked polysaccharide or oligosaccharide) and, optionally, an external layer comprising an amphiphilic compound, such as a phospholipid (see e.g., U.S. Pat. No. 5,151,254 and PCT applications WO 94/20078, WO/94/23701 and WO 96/06638). The amount of active compound contained within a sustained release formulation depends upon the site of implantation, the rate and expected duration of release and the nature of the condition to be treated or prevented.

[0891] In another illustrative embodiment, biodegradable microspheres (e.g., polylactate polyglycolate) are employed as carriers for the compositions of this invention. Suitable biodegradable microspheres are disclosed, for example, in U.S. Pat. Nos. 4,897,268; 5,075,109; 5,928,647; 5,811,128; 5,820,883; 5,853,763; 5,814,344, 5,407,609 and 5,942,252. Modified hepatitis B core protein carrier systems. such as described in WO/99 40934, and references cited therein, will also be useful for many applications. Another illustrative carrier/delivery system employs a carrier comprising particulate-protein complexes, such as those described in U.S. Pat. No. 5,928,647, which are capable of inducing a class I-restricted cytotoxic T lymphocyte responses in a host.

[0892] The pharmaceutical compositions of the invention will often further comprise one or more buffers (e.g., neutral buffered saline or phosphate buffered saline), carbohydrates (e.g., glucose, mannose, sucrose or dextrans), mannitol, proteins, polypeptides or amino acids such as glycine, antioxidants, bacteriostats, chelating agents such as EDTA or glutathione, adjuvants (e.g. aluminum hydroxide), solutes that render the formulation isotonic, hypotonic or weakly hypertonic with the blood of a recipient, suspending agents, thickening agents and/or preservatives. Alternatively, compositions of the present invention may be formulated as a lyophilizate.

[0893] The pharmaceutical compositions described herein may be presented in unit-dose or multi-dose containers, such as sealed ampoules or vials. Such containers are typically sealed in such a way to preserve the sterility and stability of the formulation until use. In general, formulations may be stored as suspensions, solutions or emulsions in oily or aqueous vehicles. Alternatively, a pharmaceutical composition may be stored in a freeze-dried condition requiring only the addition of a sterile liquid carrier immediately prior to use.

[0894] The development of suitable dosing and treatment regimens for using the particular compositions described herein in a variety of treatment regimens, including e.g., oral, parenteral, intravenous, intranasal, and intramuscular administration and formulation, is well known in the art, some of which are briefly discussed below for general purposes of illustration.

[0895] In certain applications, the pharmaceutical compositions disclosed herein may be delivered via oral administration to an animal. As such, these compositions may be formulated with an inert diluent or with an assimilable edible carrier, or they may be enclosed in hard- or soft-shell gelatin capsule, or they may be compressed into tablets, or they may be incorporated directly with the food of the diet.

[0896] The active compounds may even be incorporated with excipients and used in the form of ingestible tablets, buccal tables, troches, capsules, elixirs, suspensions, syrups, wafers, and the like (see, for example, Mathiowitz et al., Nature Mar. 27, 1997;386(6623):410-4; Hwang et al., Crit Rev Ther Drug Carrier Syst 1998;15(3):243-84; U.S. Pat. Nos. 5,641,515; 5,580,579 and 5,792,451). Tablets, troches, pills, capsules and the like may also contain any of a variety of additional components, for example, a binder, such as gum tragacanth, acacia, cornstarch, or gelatin; excipients, such as dicalcium phosphate; a disintegrating agent, such as corn starch, potato starch, alginic acid and the like; a lubricant, such as magnesium stearate; and a sweetening agent, such as sucrose, lactose or saccharin may be added or a flavoring agent, such as peppermint, oil of wintergreen, or cherry flavoring. When the dosage unit form is a capsule, it may contain, in addition to materials of the above type, a liquid carrier. Various other materials may be present as coatings or to otherwise modify the physical form of the dosage unit. For instance, tablets, pills, or capsules may be coated with shellac, sugar, or both. Of course, any material used in preparing any dosage unit form should be pharmaceutically pure and substantially non-toxic in the amounts employed. In addition, the active compounds may be incorporated into sustained-release preparation and formulations.

[0897] Typically, these formulations will contain at least about 0.1% of the active compound or more, although the percentage of the active ingredient(s) may, of course, be varied and may conveniently be between about 1 or 2% and about 60% or 70% or more of the weight or volume of the total formulation. Naturally, the amount of active compound(s) in each therapeutically useful composition may be prepared is such a way that a suitable dosage will be obtained in any given unit dose of the compound. Factors such as solubility, bioavailability, biological half-life, route of administration, product shelf life, as well as other pharmacological considerations will be contemplated by one skilled in the art of preparing such pharmaceutical formulations, and as such, a variety of dosages and treatment regimens may be desirable.

[0898] For oral administration, the compositions of the present invention may alternatively be incorporated with one or more excipients in the form of a mouthwash, dentifrice, buccal tablet, oral spray, or sublingual orally-administered formulation. Alternatively, the active ingredient may be incorporated into an oral solution such as one containing sodium borate, glycerin and potassium bicarbonate, or dispersed in a dentifrice, or added in a therapeutically-effective amount to a composition that may include water, binders, abrasives, flavoring agents, foaming agents, and humectants. Alternatively the compositions may be fashioned into a tablet or solution form that may be placed under the tongue or otherwise dissolved in the mouth.

[0899] In certain circumstances it will be desirable to deliver the pharmaceutical compositions disclosed herein parenterally, intravenously, intramuscularly, or even intraperitoneally. Such approaches are well known to the skilled artisan, some of which are further described, for example, in U.S. Pat. Nos. 5,543,158; 5,641,515 and 5,399,363. In certain embodiments, solutions of the active compounds as free base or pharmacologically acceptable salts may be prepared in water suitably mixed with a surfactant, such as hydroxypropylcellulose. Dispersions may also be prepared in glycerol, liquid polyethylene glycols, and mixtures thereof and in oils. Under ordinary conditions of storage and use, these preparations generally will contain a preservative to prevent the growth of microorganisms.

[0900] Illustrative pharmaceutical forms suitable for injectable use include sterile aqueous solutions or dispersions and sterile powders for the extemporaneous preparation of sterile injectable solutions or dispersions (for example, see U.S. Pat. No. 5,466,468). In all cases the form must be sterile and must be fluid to the extent that easy syringability exists. It must be stable under the conditions of manufacture and storage and must be preserved against the contaminating action of microorganisms, such as bacteria and fungi. The carrier can be a solvent or dispersion medium containing, for example, water, ethanol, polyol (e.g., glycerol, propylene glycol, and liquid polyethylene glycol, and the like), suitable mixtures thereof, and/or vegetable oils. Proper fluidity may be maintained, for example, by the use of a coating, such as lecithin, by the maintenance of the required particle size in the case of dispersion and/or by the use of surfactants. The prevention of the action of microorganisms can be facilitated by various antibacterial and antifungal agents, for example, parabens, chlorobutanol, phenol, sorbic acid, thimerosal, and the like. In many cases, it will be preferable to include isotonic agents, for example, sugars or sodium chloride. Prolonged absorption of the injectable compositions can be brought about by the use in the compositions of agents delaying absorption, for example, aluminum monostearate and gelatin.

[0901] In one embodiment, for parenteral administration in an aqueous solution, the solution should be suitably buffered if necessary and the liquid diluent first rendered isotonic with sufficient saline or glucose. These particular aqueous solutions are especially suitable for intravenous, intramuscular, subcutaneous and intraperitoneal administration. In this connection, a sterile aqueous medium that can be employed will be known to those of skill in the art in light of the present disclosure. For example, one dosage may be dissolved in 1 ml of isotonic NaCl solution and either added to 1000 ml of hypodermoclysis fluid or injected at the proposed site of infusion, (see for example, “Remington's Pharmaceutical Sciences” 15th Edition, pages 1035-1038 and 1570-1580). Some variation in dosage will necessarily occur depending on the condition of the subject being treated. Moreover, for human administration, preparations will of course preferably meet sterility, pyrogenicity, and the general safety and purity standards as required by FDA Office of Biologics standards.

[0902] In another embodiment of the invention, the compositions disclosed herein may be formulated in a neutral or salt form. Illustrative pharmaceutically-acceptable salts include the acid addition salts (formed with the free amino groups of the protein) and which are formed with inorganic acids such as, for example, hydrochloric or phosphoric acids, or such organic acids as acetic, oxalic, tartaric, mandelic, and the like. Salts formed with the free carboxyl groups can also be derived from inorganic bases such as, for example, sodium, potassium, ammonium, calcium, or ferric hydroxides, and such organic bases as isopropylamine, trimethylamine, histidine, procaine and the like. Upon formulation, solutions will be administered in a manner compatible with the dosage formulation and in such amount as is therapeutically effective.

[0903] The carriers can further comprise any and all solvents, dispersion media, vehicles, coatings, diluents, antibacterial and antifungal agents, isotonic and absorption delaying agents, buffers, carrier solutions, suspensions, colloids, and the like. The use of such media and agents for pharmaceutical active substances is well known in the art. Except insofar as any conventional media or agent is incompatible with the active ingredient, its use in the therapeutic compositions is contemplated. Supplementary active ingredients can also be incorporated into the compositions. The phrase “pharmaceutically-acceptable” refers to molecular entities and compositions that do not produce an allergic or similar untoward reaction when administered to a human.

[0904] In certain embodiments, the pharmaceutical compositions may be delivered by intranasal sprays, inhalation, and/or other aerosol delivery vehicles. Methods for delivering genes, nucleic acids, and peptide compositions directly to the lungs via nasal aerosol sprays has been described, e.g., in U.S. Pat. Nos. 5,756,353 and 5,804,212. Likewise, the delivery of drugs using intranasal microparticle resins (Takenaga et al., J Controlled Release Mar. 2, 1998;52(1-2):81-7) and lysophosphatidyl-glycerol compounds (U.S. Pat. No. 5,725,871) are also well-known in the pharmaceutical arts. Likewise, illustrative transmucosal drug delivery in the form of a polytetrafluoroetheylene support matrix is described in U.S. Pat. No. 5,780,045.

[0905] In certain embodiments, liposomes, nanocapsules, microparticles, lipid particles, vesicles, and the like, are used for the introduction of the compositions of the present invention into suitable host cells/organisms. In particular, the compositions of the present invention may be formulated for delivery either encapsulated in a lipid particle, a liposome, a vesicle, a nanosphere, or a nanoparticle or the like. Alternatively, compositions of the present invention can be bound, either covalently or non-covalently, to the surface of such carrier vehicles.

[0906] The formation and use of liposome and liposome-like preparations as potential drug carriers is generally known to those of skill in the art (see for example, Lasic, Trends Biotechnol July 1998;16(7):307-21; Takakura, Nippon Rinsho March 1998;56(3):691-5; Chandran et al., Indian J. Exp Biol. August 1997;35(8):801-9; Margalit, Crit Rev Ther Drug Carrier Syst. 1995;12(2-3):233-61; U.S. Pat. Nos. 5,567,434; 5,552,157; 5,565,213; 5,738,868 and 5,795,587, each specifically incorporated herein by reference in its entirety).

[0907] Liposomes have been used successfully with a number of cell types that are normally difficult to transfect by other procedures, including T cell suspensions, primary hepatocyte cultures and PC 12 cells (Renneisen et al., J Biol Chem. Sep. 25, 1990;265(27):16337-42; Muller et al., DNA Cell Biol. April 1990;9(3):221-9). In addition, liposomes are free of the DNA length constraints that are typical of viral-based delivery systems. Liposomes have been used effectively to introduce genes, various drugs, radiotherapeutic agents, enzymes, viruses, transcription factors, allosteric effectors and the like, into a variety of cultured cell lines and animals. Furthermore, he use of liposomes does not appear to be associated with autoimmune responses or unacceptable toxicity after systemic delivery.

[0908] In certain embodiments, liposomes are formed from phospholipids that are dispersed in an aqueous medium and spontaneously form multilamellar concentric bilayer vesicles (also termed multilamellar vesicles (MLVs).

[0909] Alternatively, in other embodiments, the invention provides for pharmaceutically-acceptable nanocapsule formulations of the compositions of the present invention. Nanocapsules can generally entrap compounds in a stable and reproducible way (see, for example, Quintanar-Guerrero et al., Drug Dev Ind Pharm. December 1998;24(12):1113-28). To avoid side effects due to intracellular polymeric overloading, such ultrafine particles (sized around 0.1 μm) may be designed using polymers able to be degraded in vivo. Such particles can be made as described, for example, by Couvreur et al., Crit Rev Ther Drug Carrier Syst. 1988;5(1):1-20; zur Muhlen et al., Eur J Pharm Biopharm. March 1998;45(2):149-55; Zambaux et al. J Controlled Release. Jan. 2, 1998;50(1-3):31-40; and U.S. Pat. No. 5,145,684.

[0910] Cancer Therapeutic Methods

[0911] In further aspects of the present invention, the pharmaceutical compositions described herein may be used for the treatment of cancer, particularly for the immunotherapy of prostate cancer. Within such methods, the pharmaceutical compositions described herein are administered to a patient, typically a warm-blooded animal, preferably a human. A patient may or may not be afflicted with cancer. Accordingly, the above pharmaceutical compositions may be used to prevent the development of a cancer or to treat a patient afflicted with a cancer. Pharmaceutical compositions and vaccines may be administered either prior to or following surgical removal of primary tumors and/or treatment such as administration of radiotherapy or conventional chemotherapeutic drugs. As discussed above, administration of the pharmaceutical compositions may be by any suitable method, including administration by intravenous, intraperitoneal, intramuscular, subcutaneous, intranasal, intradermal, anal, vaginal, topical and oral routes.

[0912] Within certain embodiments, immunotherapy may be active immunotherapy, in which treatment relies on the in vivo stimulation of the endogenous host immune system to react against tumors with the administration of immune response-modifying agents (such as polypeptides and polynucleotides as provided herein).

[0913] Within other embodiments, immunotherapy may be passive immunotherapy, in which treatment involves the delivery of agents with established tumor-immune reactivity (such as effector cells or antibodies) that can directly or indirectly mediate antitumor effects and does not necessarily depend on an intact host immune system. Examples of effector cells include T cells as discussed above, T lymphocytes (such as CD8⁺ cytotoxic T lymphocytes and CD4⁺ T-helper tumor-infiltrating lymphocytes), killer cells (such as Natural Killer cells and lymphokine-activated killer cells), B cells and antigen-presenting cells (such as dendritic cells and macrophages) expressing a polypeptide provided herein. T cell receptors and antibody receptors specific for the polypeptides recited herein may be cloned, expressed and transferred into other vectors or effector cells for adoptive immunotherapy. The polypeptides provided herein may also be used to generate antibodies or anti-idiotypic antibodies (as described above and in U.S. Pat. No. 4,918,164) for passive immunotherapy.

[0914] Effector cells may generally be obtained in sufficient quantities for adoptive immunotherapy by growth in vitro, as described herein. Culture conditions for expanding single antigen-specific effector cells to several billion in number with retention of antigen recognition in vivo are well known in the art. Such in vitro culture conditions typically use intermittent stimulation with antigen, often in the presence of cytokines (such as IL-2) and non-dividing feeder cells. As noted above, immunoreactive polypeptides as provided herein may be used to rapidly expand antigen-specific T cell cultures in order to generate a sufficient number of cells for immunotherapy. In particular, antigen-presenting cells, such as dendritic, macrophage, monocyte, fibroblast and/or B cells, may be pulsed with immunoreactive polypeptides or transfected with one or more polynucleotides using standard techniques well known in the art. For example, antigen-presenting cells can be transfected with a polynucleotide having a promoter appropriate for increasing expression in a recombinant virus or other expression system. Cultured effector cells for use in therapy must be able to grow and distribute widely, and to survive long term in vivo. Studies have shown that cultured effector cells can be induced to grow in vivo and to survive long term in substantial numbers by repeated stimulation with antigen supplemented with IL-2 (see, for example, Cheever et al., Immunological Reviews 157:177, 1997).

[0915] Alternatively, a vector expressing a polypeptide recited herein may be introduced into antigen presenting cells taken from a patient and clonally propagated ex vivo for transplant back into the same patient. Transfected cells may be reintroduced into the patient using any means known in the art, preferably in sterile form by intravenous, intracavitary, intraperitoneal or intratumor administration.

[0916] Routes and frequency of administration of the therapeutic compositions described herein, as well as dosage, will vary from individual to individual, and may be readily established using standard techniques. In general, the pharmaceutical compositions and vaccines may be administered by injection (e.g., intracutaneous, intramuscular, intravenous or subcutaneous), intranasally (e.g., by aspiration) or orally. Preferably, between 1 and 10 doses may be administered over a 52 week period. Preferably, 6 doses are administered, at intervals of 1 month, and booster vaccinations may be given periodically thereafter. Alternate protocols may be appropriate for individual patients. A suitable dose is an amount of a compound that, when administered as described above, is capable of promoting an anti-tumor immune response, and is at least 10-50% above the basal (i.e., untreated) level. Such response can be monitored by measuring the anti-tumor antibodies in a patient or by vaccine-dependent generation of cytolytic effector cells capable of killing the patient's tumor cells in vitro. Such vaccines should also be capable of causing an immune response that leads to an improved clinical outcome (e.g., more frequent remissions, complete or partial or longer disease-free survival) in vaccinated patients as compared to non-vaccinated patients. In general, for pharmaceutical compositions and vaccines comprising one or more polypeptides, the amount of each polypeptide present in a dose ranges from about 25 μg to 5 mg per kg of host. Suitable dose sizes will vary with the size of the patient, but will typically range from about 0.1 mL to about 5 mL.

[0917] In general, an appropriate dosage and treatment regimen provides the active compound(s) in an amount sufficient to provide therapeutic and/or prophylactic benefit. Such a response can be monitored by establishing an improved clinical outcome (e.g., more frequent remissions, complete or partial, or longer disease-free survival) in treated patients as compared to non-treated patients. Increases in preexisting immune responses to a tumor protein generally correlate with an improved clinical outcome. Such immune responses may generally be evaluated using standard proliferation, cytotoxicity or cytokine assays, which may be performed using samples obtained from a patient before and after treatment.

[0918] Cancer Detection and Diagnostic Compositions, Methods and Kits

[0919] In general, a cancer may be detected in a patient based on the presence of one or more prostate tumor proteins and/or polynucleotides encoding such proteins in a biological sample (for example, blood, sera, sputum urine and/or tumor biopsies) obtained from the patient. In other words, such proteins may be used as markers to indicate the presence or absence of a cancer such as prostate cancer. In addition, such proteins may be useful for the detection of other cancers. The binding agents provided herein generally permit detection of the level of antigen that binds to the agent in the biological sample. Polynucleotide primers and probes may be used to detect the level of mRNA encoding a tumor protein, which is also indicative of the presence or absence of a cancer. In general, a prostate tumor sequence should be present at a level that is at least three fold higher in tumor tissue than in normal tissue.

[0920] There are a variety of assay formats known to those of ordinary skill in the art for using a binding agent to detect polypeptide markers in a sample. See, e.g., Harlow and Lane, Antibodies: A Laboratory Manual, Cold Spring Harbor Laboratory, 1988. In general, the presence or absence of a cancer in a patient may be determined by (a) contacting a biological sample obtained from a patient with a binding agent; (b) detecting in the sample a level of polypeptide that binds to the binding agent; and (c) comparing the level of polypeptide with a predetermined cut-off value.

[0921] In a preferred embodiment, the assay involves the use of binding agent immobilized on a solid support to bind to and remove the polypeptide from the remainder of the sample. The bound polypeptide may then be detected using a detection reagent that contains a reporter group and specifically binds to the binding agent/polypeptide complex. Such detection reagents may comprise, for example, a binding agent that specifically binds to the polypeptide or an antibody or other agent that specifically binds to the binding agent, such as an anti-immunoglobulin, protein G, protein A or a lectin. Alternatively, a competitive assay may be utilized, in which a polypeptide is labeled with a reporter group and allowed to bind to the immobilized binding agent after incubation of the binding agent with the sample. The extent to which components of the sample inhibit the binding of the labeled polypeptide to the binding agent is indicative of the reactivity of the sample with the immobilized binding agent. Suitable polypeptides for use within such assays include full length prostate tumor proteins and polypeptide portions thereof to which the binding agent binds, as described above.

[0922] The solid support may be any material known to those of ordinary skill in the art to which the tumor protein may be attached. For example, the solid support may be a test well in a microtiter plate or a nitrocellulose or other suitable membrane. Alternatively, the support may be a bead or disc, such as glass, fiberglass, latex or a plastic material such as polystyrene or polyvinylchloride. The support may also be a magnetic particle or a fiber optic sensor, such as those disclosed, for example, in U.S. Pat. No. 5,359,681. The binding agent may be immobilized on the solid support using a variety of techniques known to those of skill in the art, which are amply described in the patent and scientific literature. In the context of the present invention, the term “immobilization” refers to both noncovalent association, such as adsorption, and covalent attachment (which may be a direct linkage between the agent and functional groups on the support or may be a linkage by way of a cross-linking agent). Immobilization by adsorption to a well in a microtiter plate or to a membrane is preferred. In such cases, adsorption may be achieved by contacting the binding agent, in a suitable buffer, with the solid support for a suitable amount of time. The contact time varies with temperature, but is typically between about 1 hour and about 1 day. In general, contacting a well of a plastic microtiter plate (such as polystyrene or polyvinylchloride) with an amount of binding agent ranging from about 10 ng to about 10 μg, and preferably about 100 ng to about 1 μg, is sufficient to immobilize an adequate amount of binding agent.

[0923] Covalent attachment of binding agent to a solid support may generally be achieved by first reacting the support with a bifunctional reagent that will react with both the support and a functional group, such as a hydroxyl or amino group, on the binding agent. For example, the binding agent may be covalently attached to supports having an appropriate polymer coating using benzoquinone or by condensation of an aldehyde group on the support with an amine and an active hydrogen on the binding partner (see, e.g., Pierce Immunotechnology Catalog and Handbook, 1991, at A12-A13).

[0924] In certain embodiments, the assay is a two-antibody sandwich assay. This assay may be performed by first contacting an antibody that has been immobilized on a solid support, commonly the well of a microtiter plate, with the sample, such that polypeptides within the sample are allowed to bind to the immobilized antibody. Unbound sample is then removed from the immobilized polypeptide-antibody complexes and a detection reagent (preferably a second antibody capable of binding to a different site on the polypeptide) containing a reporter group is added. The amount of detection reagent that remains bound to the solid support is then determined using a method appropriate for the specific reporter group.

[0925] More specifically, once the antibody is immobilized on the support as described above, the remaining protein binding sites on the support are typically blocked. Any suitable blocking agent known to those of ordinary skill in the art, such as bovine serum albumin or Tween 20™ (Sigma Chemical Co., St. Louis, Mo.). The immobilized antibody is then incubated with the sample, and polypeptide is allowed to bind to the antibody. The sample may be diluted with a suitable diluent, such as phosphate-buffered saline (PBS) prior to incubation. In general, an appropriate contact time (i.e., incubation time) is a period of time that is sufficient to detect the presence of polypeptide within a sample obtained from an individual with prostate cancer. Preferably, the contact time is sufficient to achieve a level of binding that is at least about 95% of that achieved at equilibrium between bound and unbound polypeptide. Those of ordinary skill in the art will recognize that the time necessary to achieve equilibrium may be readily determined by assaying the level of binding that occurs over a period of time. At room temperature, an incubation time of about 30 minutes is generally sufficient.

[0926] Unbound sample may then be removed by washing the solid support with an appropriate buffer, such as PBS containing 0.1% Tween 20™. The second antibody, which contains a reporter group, may then be added to the solid support. Preferred reporter groups include those groups recited above.

[0927] The detection reagent is then incubated with the immobilized antibody-polypeptide complex for an amount of time sufficient to detect the bound polypeptide. An appropriate amount of time may generally be determined by assaying the level of binding that occurs over a period of time. Unbound detection reagent is then removed and bound detection reagent is detected using the reporter group. The method employed for detecting the reporter group depends upon the nature of the reporter group. For radioactive groups, scintillation counting or autoradiographic methods are generally appropriate. Spectroscopic methods may be used to detect dyes, luminescent groups and fluorescent groups. Biotin may be detected using avidin, coupled to a different reporter group (commonly a radioactive or fluorescent group or an enzyme). Enzyme reporter groups may generally be detected by the addition of substrate (generally for a specific period of time), followed by spectroscopic or other analysis of the reaction products.

[0928] To determine the presence or absence of a cancer, such as prostate cancer, the signal detected from the reporter group that remains bound to the solid support is generally compared to a signal that corresponds to a predetermined cut-off value. In one preferred embodiment, the cut-off value for the detection of a cancer is the average mean signal obtained when the immobilized antibody is incubated with samples from patients without the cancer. In general, a sample generating a signal that is three standard deviations above the predetermined cut-off value is considered positive for the cancer. In an alternate preferred embodiment, the cut-off value is determined using a Receiver Operator Curve, according to the method of Sackett et al., Clinical Epidemiology: A Basic Science for Clinical Medicine, Little Brown and Co., 1985, p. 106-7. Briefly, in this embodiment, the cut-off value may be determined from a plot of pairs of true positive rates (i.e., sensitivity) and false positive rates (100%-specificity) that correspond to each possible cut-off value for the diagnostic test result. The cut-off value on the plot that is the closest to the upper left-hand corner (i.e., the value that encloses the largest area) is the most accurate cut-off value, and a sample generating a signal that is higher than the cut-off value determined by this method may be considered positive. Alternatively, the cut-off value may be shifted to the left along the plot, to minimize the false positive rate, or to the right, to minimize the false negative rate. In general, a sample generating a signal that is higher than the cut-off value determined by this method is considered positive for a cancer.

[0929] In a related embodiment, the assay is performed in a flow-through or strip test format, wherein the binding agent is immobilized on a membrane, such as nitrocellulose. In the flow-through test, polypeptides within the sample bind to the immobilized binding agent as the sample passes through the membrane. A second, labeled binding agent then binds to the binding agent-polypeptide complex as a solution containing the second binding agent flows through the membrane. The detection of bound second binding agent may then be performed as described above. In the strip test format, one end of the membrane to which binding agent is bound is immersed in a solution containing the sample. The sample migrates along the membrane through a region containing second binding agent and to the area of immobilized binding agent. Concentration of second binding agent at the area of immobilized antibody indicates the presence of a cancer. Typically, the concentration of second binding agent at that site generates a pattern, such as a line, that can be read visually. The absence of such a pattern indicates a negative result. In general, the amount of binding agent immobilized on the membrane is selected to generate a visually discernible pattern when the biological sample contains a level of polypeptide that would be sufficient to generate a positive signal in the two-antibody sandwich assay, in the format discussed above. Preferred binding agents for use in such assays are antibodies and antigen-binding fragments thereof. Preferably, the amount of antibody immobilized on the membrane ranges from about 25 ng to about 1 μg, and more preferably from about 50 ng to about 500 ng. Such tests can typically be performed with a very small amount of biological sample.

[0930] Of course, numerous other assay protocols exist that are suitable for use with the tumor proteins or binding agents of the present invention. The above descriptions are intended to be exemplary only. For example, it will be apparent to those of ordinary skill in the art that the above protocols may be readily modified to use tumor polypeptides to detect antibodies that bind to such polypeptides in a biological sample. The detection of such tumor protein specific antibodies may correlate with the presence of a cancer.

[0931] A cancer may also, or alternatively, be detected based on the presence of T cells that specifically react with a tumor protein in a biological sample. Within certain methods, a biological sample comprising CD4⁺ and/or CD8⁺ T cells isolated from a patient is incubated with a tumor polypeptide, a polynucleotide encoding such a polypeptide and/or an APC that expresses at least an immunogenic portion of such a polypeptide, and the presence or absence of specific activation of the T cells is detected. Suitable biological samples include, but are not limited to, isolated T cells. For example, T cells may be isolated from a patient by routine techniques (such as by Ficoll/Hypaque density gradient centrifugation of peripheral blood lymphocytes). T cells may be incubated in vitro for 2-9 days (typically 4 days) at 37° C. with polypeptide (e.g., 5-25 μg/ml). It may be desirable to incubate another aliquot of a T cell sample in the absence of tumor polypeptide to serve as a control. For CD4⁺ T cells, activation is preferably detected by evaluating proliferation of the T cells. For CD8⁺ T cells, activation is preferably detected by evaluating cytolytic activity. A level of proliferation that is at least two fold greater and/or a level of cytolytic activity that is at least 20% greater than in disease-free patients indicates the presence of a cancer in the patient.

[0932] As noted above, a cancer may also, or alternatively, be detected based on the level of mRNA encoding a tumor protein in a biological sample. For example, at least two oligonucleotide primers may be employed in a polymerase chain reaction (PCR) based assay to amplify a portion of a tumor cDNA derived from a biological sample, wherein at least one of the oligonucleotide primers is specific for (i.e., hybridizes to) a polynucleotide encoding the tumor protein. The amplified cDNA is then separated and detected using techniques well known in the art, such as gel electrophoresis. Similarly, oligonucleotide probes that specifically hybridize to a polynucleotide encoding a tumor protein may be used in a hybridization assay to detect the presence of polynucleotide encoding the tumor protein in a biological sample.

[0933] To permit hybridization under assay conditions, oligonucleotide primers and probes should comprise an oligonucleotide sequence that has at least about 60%, preferably at least about 75% and more preferably at least about 90%, identity to a portion of a polynucleotide encoding a tumor protein of the invention that is at least 10 nucleotides, and preferably at least 20 nucleotides, in length. Preferably, oligonucleotide primers and/or probes hybridize to a polynucleotide encoding a polypeptide described herein under moderately stringent conditions, as defined above. Oligonucleotide primers and/or probes which may be usefully employed in the diagnostic methods described herein preferably are at least 10-40 nucleotides in length. In a preferred embodiment, the oligonucleotide primers comprise at least 10 contiguous nucleotides, more preferably at least 15 contiguous nucleotides, of a DNA molecule having a sequence as disclosed herein. Techniques for both PCR based assays and hybridization assays are well known in the art (see, for example, Mullis et al., Cold Spring Harbor Symp. Quant. Biol., 51:263, 1987; Erlich ed., PCR Technology, Stockton Press, N.Y., 1989).

[0934] One preferred assay employs RT-PCR, in which PCR is applied in conjunction with reverse transcription. Typically, RNA is extracted from a biological sample, such as biopsy tissue, and is reverse transcribed to produce cDNA molecules. PCR amplification using at least one specific primer generates a cDNA molecule, which may be separated and visualized using, for example, gel electrophoresis. Amplification may be performed on biological samples taken from a test patient and from an individual who is not afflicted with a cancer. The amplification reaction may be performed on several dilutions of cDNA spanning two orders of magnitude. A two-fold or greater increase in expression in several dilutions of the test patient sample as compared to the same dilutions of the non-cancerous sample is typically considered positive.

[0935] In another embodiment, the compositions described herein may be used as markers for the progression of cancer. In this embodiment, assays as described above for the diagnosis of a cancer may be performed over time, and the change in the level of reactive polypeptide(s) or polynucleotide(s) evaluated. For example, the assays may be performed every 24-72 hours for a period of 6 months to 1 year, and thereafter performed as needed. In general, a cancer is progressing in those patients in whom the level of polypeptide or polynucleotide detected increases over time. In contrast, the cancer is not progressing when the level of reactive polypeptide or polynucleotide either remains constant or decreases with time.

[0936] Certain in vivo diagnostic assays may be performed directly on a tumor. One such assay involves contacting tumor cells with a binding agent. The bound binding agent may then be detected directly or indirectly via a reporter group. Such binding agents may also be used in histological applications. Alternatively, polynucleotide probes may be used within such applications.

[0937] As noted above, to improve sensitivity, multiple tumor protein markers may be assayed within a given sample. It will be apparent that binding agents specific for different proteins provided herein may be combined within a single assay. Further, multiple primers or probes may be used concurrently. The selection of tumor protein markers may be based on routine experiments to determine combinations that results in optimal sensitivity. In addition, or alternatively, assays for tumor proteins provided herein may be combined with assays for other known tumor antigens.

[0938] The present invention further provides kits for use within any of the above diagnostic methods. Such kits typically comprise two or more components necessary for performing a diagnostic assay. Components may be compounds, reagents, containers and/or equipment. For example, one container within a kit may contain a monoclonal antibody or fragment thereof that specifically binds to a tumor protein. Such antibodies or fragments may be provided attached to a support material, as described above. One or more additional containers may enclose elements, such as reagents or buffers, to be used in the assay. Such kits may also, or alternatively, contain a detection reagent as described above that contains a reporter group suitable for direct or indirect detection of antibody binding.

[0939] Alternatively, a kit may be designed to detect the level of mRNA encoding a tumor protein in a biological sample. Such kits generally comprise at least one oligonucleotide probe or primer, as described above, that hybridizes to a polynucleotide encoding a tumor protein. Such an oligonucleotide may be used, for example, within a PCR or hybridization assay. Additional components that may be present within such kits include a second oligonucleotide and/or a diagnostic reagent or container to facilitate the detection of a polynucleotide encoding a tumor protein.

[0940] The following Examples are offered by way of illustration and not by way of limitation.

### EXAMPLES

### Example 1

### Isolation and Characterization of Prostate-Specific Polypeptides

[0941] This Example describes the isolation of certain prostate-specific polypeptides from a prostate tumor cDNA library.

[0942] A human prostate tumor cDNA expression library was constructed from prostate tumor poly A⁺ RNA using a Superscript Plasmid System for cDNA Synthesis and Plasmid Cloning kit (BRL Life Technologies, Gaithersburg, Md. 20897) following the manufacturer's protocol. Specifically, prostate tumor tissues were homogenized with polytron (Kinematica, Switzerland) and total RNA was extracted using Trizol reagent (BRL Life Technologies) as directed by the manufacturer. The poly A+ RNA was then purified using a Qiagen oligotex spin column mRNA purification kit (Qiagen, Santa Clarita, Calif. 91355) according to the manufacturer's protocol. First-strand cDNA was synthesized using the NotI/Oligo-dT18 primer. Double-stranded cDNA was synthesized, ligated with EcoRI/BAXI adaptors (Invitrogen, San Diego, Calif.) and digested with NotI. Following size fractionation with Chroma Spin-1000 columns (Clontech, Palo Alto, Calif.), the cDNA was ligated into the EcoRI/NotI site of pcDNA3.1 (Invitrogen) and transformed into ElectroMax E. coli DH10B cells (BRL Life Technologies) by electroporation.

[0943] Using the same procedure, a normal human pancreas cDNA expression library was prepared from a pool of six tissue specimens (Clontech). The cDNA libraries were characterized by determining the number of independent colonies, the percentage of clones that carried insert, the average insert size and by sequence analysis. The prostate tumor library contained 1.64×10⁷ independent colonies, with 70% of clones having an insert and the average insert size being 1745 base pairs. The normal pancreas cDNA library contained 3.3×10⁶ independent colonies, with 69% of clones having inserts and the average insert size being 1120 base pairs. For both libraries, sequence analysis showed that the majority of clones had a full length cDNA sequence and were synthesized from mRNA, with minimal rRNA and mitochondrial DNA contamination.

[0944] cDNA library subtraction was performed using the above prostate tumor and normal pancreas cDNA libraries, as described by Hara et al. (Blood, 84:189-199, 1994) with some modifications. Specifically, a prostate tumor-specific subtracted cDNA library was generated as follows. Normal pancreas cDNA library (70 μg) was digested with EcoRI, NotI, and SfuI, followed by a filling-in reaction with DNA polymerase Klenow fragment. After phenol-chloroform extraction and ethanol precipitation, the DNA was dissolved in 100 μl of H₂O, heat-denatured and mixed with 100 μl (100 μg) of Photoprobe biotin (Vector Laboratories, Burlingame, Calif.). As recommended by the manufacturer, the resulting mixture was irradiated with a 270 W sunlamp on ice for 20 minutes. Additional Photoprobe biotin (50 μl) was added and the biotinylation reaction was repeated. After extraction with butanol five times, the DNA was ethanol-precipitated and dissolved in 23 μl H₂O to form the driver DNA.

[0945] To form the tracer DNA, 10 μg prostate tumor cDNA library was digested with BamHI and XhoI, phenol chloroform extracted and passed through Chroma spin-400 columns (Clontech). Following ethanol precipitation, the tracer DNA was dissolved in 5 μl H₂O. Tracer DNA was mixed with 15 μl driver DNA and 20 μl of 2× hybridization buffer (1.5 M NaCl/10 mM EDTA/50 mM HEPES pH 7.5/0.2% sodium dodecyl sulfate), overlaid with mineral oil, and heat-denatured completely. The sample was immediately transferred into a 68° C. water bath and incubated for 20 hours (long hybridization [LH]). The reaction mixture was then subjected to a streptavidin treatment followed by phenol/chloroform extraction. This process was repeated three more times. Subtracted DNA was precipitated, dissolved in 12 μl H₂O, mixed with 8 μl driver DNA and 20 μl of 2× hybridization buffer, and subjected to a hybridization at 68° C. for 2 hours (short hybridization [SH]). After removal of biotinylated double-stranded DNA, subtracted cDNA was ligated into BamHI/XhoI site of chloramphenicol resistant pBCSK⁺ (Stratagene, La Jolla, Calif. 92037) and transformed into ElectroMax E. coli DH10B cells by electroporation to generate a prostate tumor specific subtracted cDNA library (referred to as “prostate subtraction 1”).

[0946] To analyze the subtracted cDNA library, plasmid DNA was prepared from 100 independent clones, randomly picked from the subtracted prostate tumor specific library and grouped based on insert size. Representative cDNA clones were further characterized by DNA sequencing with a Perkin Elmer/Applied Biosystems Division Automated Sequencer Model 373A (Foster City, Calif.). Six cDNA clones, hereinafter referred to as F1-13, F1-12, F1-16, H1-1, H1-9 and H1-4, were shown to be abundant in the subtracted prostate-specific cDNA library. The determined 3′ and 5′ cDNA sequences for F1-12 are provided in SEQ ID NO: 2 and 3, respectively, with determined 3′ cDNA sequences for F1-13, F1-16, H1-1, H1-9 and H1-4 being provided in SEQ ID NO: 1 and 4-7, respectively.

[0947] The cDNA sequences for the isolated clones were compared to known sequences in the gene bank using the EMBL and GenBank databases (release 96). Four of the prostate tumor cDNA clones, F1-13, F1-16, H1-1, and H1-4, were determined to encode the following previously identified proteins: prostate specific antigen (PSA), human glandular kallikrein, human tumor expression enhanced gene, and mitochondria cytochrome C oxidase subunit II. H1-9 was found to be identical to a previously identified human autonomously replicating sequence. No significant homologies to the cDNA sequence for F -12 were found.

[0948] Subsequent studies led to the isolation of a full-length cDNA sequence for Fl -12 (also referred to as P504S). This sequence is provided in SEQ ID NO: 107, with the corresponding predicted amino acid sequence being provided in SEQ ID NO: 108. cDNA splice variants of P504S are provided in SEQ ID NO: 600-605.

[0949] To clone less abundant prostate tumor specific genes, cDNA library subtraction was performed by subtracting the prostate tumor cDNA library described above with the normal pancreas cDNA library and with the three most abundant genes in the previously subtracted prostate tumor specific cDNA library: human glandular kallikrein, prostate specific antigen (PSA), and mitochondria cytochrome C oxidase subunit II. Specifically, 1 μg each of human glandular kallikrein, PSA and mitochondria cytochrome C oxidase subunit II cDNAs in pcDNA3.1 were added to the driver DNA and subtraction was performed as described above to provide a second subtracted cDNA library hereinafter referred to as the “subtracted prostate tumor specific cDNA library with spike”.

[0950] Twenty-two cDNA clones were isolated from the subtracted prostate tumor specific cDNA library with spike. The determined 3′ and 5′ cDNA sequences for the clones referred to as J1-17, L1-12, N1-1862, J1-13, J1-19, J1-25, J1-24, K1-58, K1-63, L1-4 and L1-14 are provided in SEQ ID NOS: 8-9, 10-11, 12-13, 14-15, 16-17, 18-19, 20-21, 22-23, 24-25, 26-27 and 28-29, respectively. The determined 3′ cDNA sequences for the clones referred to as J1-12, J1-16, J1-21, K1-48, K1-55, L1-2, L1-6, N1-1858, N1-1860, N1-1861, N1-1864 are provided in SEQ ID NOS: 30-40, respectively. Comparison of these sequences with those in the gene bank as described above, revealed no significant homologies to three of the five most abundant DNA species, (J1-17, L1-12 and N1-1862; SEQ ID NOS: 8-9, 10-11 and 12-13, respectively). Of the remaining two most abundant species, one (J1-12; SEQ ID NO:30) was found to be identical to the previously identified human pulmonary surfactant-associated protein, and the other (K1-48; SEQ ID NO:33) was determined to have some homology to R. norvegicus mRNA for 2-arylpropionyl-CoA epimerase. Of the 17 less abundant cDNA clones isolated from the subtracted prostate tumor specific cDNA library with spike, four (J1-16, K1-55, L1-6 and N1-1864; SEQ ID NOS:31, 34, 36 and 40, respectively) were found to be identical to previously identified sequences, two (J1-21 and N1-1860; SEQ ID NOS: 32 and 38, respectively) were found to show some homology to non-human sequences, and two (L1-2 and N1-1861; SEQ ID NOS: 35 and 39, respectively) were found to show some homology to known human sequences. No significant homologies were found to the polypeptides J1-13, J1-19, J1-24, J1-25, K1-58, K1-63, L1-4, L1-14 (SEQ ID NOS: 14-15, 16-17, 20-21, 18-19, 22-23, 24-25, 26-27, 28-29, respectively).

[0951] Subsequent studies led to the isolation of full length cDNA sequences for J1-17, L1-12 and N1-1862 (SEQ ID NOS: 109-111, respectively). The corresponding predicted amino acid sequences are provided in SEQ ID NOS: 112-114. L1-12 is also referred to as P501S. A cDNA splice variant of P501S is provided in SEQ ID NO: 606.

[0952] In a further experiment, four additional clones were identified by subtracting a prostate tumor cDNA library with normal prostate cDNA prepared from a pool of three normal prostate poly A+ RNA (referred to as “prostate subtraction 2”). The determined cDNA sequences for these clones, hereinafter referred to as U1-3064, U1-3065, V1-3692 and 1A-3905, are provided in SEQ ID NO: 69-72, respectively. Comparison of the determined sequences with those in the gene bank revealed no significant homologies to U1-3065.

[0953] A second subtraction with spike (referred to as “prostate subtraction spike 2”) was performed by subtracting a prostate tumor specific cDNA library with spike with normal pancreas cDNA library and further spiked with PSA, J1-17, pulmonary surfactant-associated protein, mitochondrial DNA, cytochrome c oxidase subunit II, N1-1862, autonomously replicating sequence, L1-12 and tumor expression enhanced gene. Four additional clones, hereinafter referred to as V1-3686, R1-2330, 1B-3976 and V1-3679, were isolated. The determined cDNA sequences for these clones are provided in SEQ ID NO:73-76, respectively. Comparison of these sequences with those in the gene bank revealed no significant homologies to V1-3686 and R1-2330.

[0954] Further analysis of the three prostate subtractions described above (prostate subtraction 2, subtracted prostate tumor specific cDNA library with spike, and prostate subtraction spike 2) resulted in the identification of sixteen additional clones, referred to as 1G-4736, 1G-4738, 1G-4741, 1G-4744, 1G-4734, 1H-4774, 1H-4781, 1H-4785, 1H-4787, 1H-4796, 1I-4810, 1I-4811, 1J-4876, 1K-4884 and 1K-4896. The determined cDNA sequences for these clones are provided in SEQ ID NOS: 77-92, respectively. Comparison of these sequences with those in the gene bank as described above, revealed no significant homologies to 1G-4741, 1G-4734, 1I-4807, 1J-4876 and 1K-4896 (SEQ ID NOS: 79, 81, 87, 90 and 92, respectively). Further analysis of the isolated clones led to the determination of extended cDNA sequences for 1G-4736, 1G-4738, 1G-4741, 1G-4744, 1H-4774, 1H-4781, 1H-4785, 1H-4787, 1H-4796, 1I-4807, 1J-4876, 1K-4884 and 1K-4896, provided in SEQ ID NOS: 179-188 and 191-193, respectively, and to the determination of additional partial cDNA sequences for 1I-4810 and 1I-4811, provided in SEQ ID NOS: 189 and 190, respectively.

[0955] Additional studies with prostate subtraction spike 2 resulted in the isolation of three more clones. Their sequences were determined as described above and compared to the most recent GenBank. All three clones were found to have homology to known genes, which are Cysteine-rich protein, KIAA0242, and KIAA0280 (SEQ ID NO: 317, 319, and 320, respectively). Further analysis of these clones by Synteni microarray (Synteni, Palo Alto, Calif.) demonstrated that all three clones were over-expressed in most prostate tumors and prostate BPH, as well as in the majority of normal prostate tissues tested, but low expression in all other normal tissues.

[0956] An additional subtraction was performed by subtracting a normal prostate cDNA library with normal pancreas cDNA (referred to as “prostate subtraction 3”). This led to the identification of six additional clones referred to as 1G-4761, 1G-4762, 1H-4766, 1H-4770, 1H-4771 and 1H-4772 (SEQ ID NOS: 93-98). Comparison of these sequences with those in the gene bank revealed no significant homologies to 1G-4761 and 1H-4771 (SEQ ID NOS: 93 and 97, respectively). Further analysis of the isolated clones led to the determination of extended cDNA sequences for 1G-4761, 1G-4762, 1H-4766 and 1H-4772 provided in SEQ ID NOS: 194-196 and 199, respectively, and to the determination of additional partial cDNA sequences for 1H-4770 and 1H-4771, provided in SEQ ID NOS: 197 and 198, respectively.

[0957] Subtraction of a prostate tumor cDNA library, prepared from a pool of polyA+ RNA from three prostate cancer patients, with a normal pancreas cDNA library (prostate subtraction 4) led to the identification of eight clones, referred to as 1D-4297, 1D-4309, 1D.1-4278, 1D-4288, 1D-4283, 1D-4304, 1D-4296 and 1D-4280 (SEQ ID NOS: 99-107). These sequences were compared to those in the gene bank as described above. No significant homologies were found to 1D-4283 and 1D-4304 (SEQ ID NOS: 103 and 104, respectively). Further analysis of the isolated clones led to the determination of extended cDNA sequences for 1D-4309, 1D.1-4278, 1D-4288, 1D-4283, 1D-4304, 1D-4296 and 1D-4280, provided in SEQ ID NOS: 200-206, respectively.

[0958] cDNA clones isolated in prostate subtraction 1 and prostate subtraction 2, described above, were colony PCR amplified and their mRNA expression levels in prostate tumor, normal prostate and in various other normal tissues were determined using microarray technology (Synteni, Palo Alto, Calif.). Briefly, the PCR amplification products were dotted onto slides in an array format, with each product occupying a unique location in the array. mRNA was extracted from the tissue sample to be tested, reverse transcribed, and fluorescent-labeled cDNA probes were generated. The microarrays were probed with the labeled cDNA probes, the slides scanned and fluorescence intensity was measured. This intensity correlates with the hybridization intensity. Two clones (referred to as P509S and P510S) were found to be over-expressed in prostate tumor and normal prostate and expressed at low levels in all other normal tissues tested (liver, pancreas, skin, bone marrow, brain, breast, adrenal gland, bladder, testes, salivary gland, large intestine, kidney, ovary, lung, spinal cord, skeletal muscle and colon). The determined cDNA sequences for P509S and P510S are provided in SEQ ID NO: 223 and 224, respectively. Comparison of these sequences with those in the gene bank as described above, revealed some homology to previously identified ESTs.

[0959] Additional, studies led to the isolation of the full-length cDNA sequence for P509S. This sequence is provided in SEQ ID NO: 332, with the corresponding predicted amino acid sequence being provided in SEQ ID NO: 339. Two variant full-length cDNA sequences for P510S are provided in SEQ ID NO: 535 and 536, with the corresponding predicted amino acid sequences being provided in SEQ ID NO: 537 and 538, respectively. Additional splice variants of P510S are provided in SEQ ID NO: 598 and 599.

[0960] The determined cDNA sequences for additional prostate-specific clones isolated during characterization of prostate specific cDNA libraries are provided in SEQ ID NO: 618-689, 691-697 and 709-772. Comparison of these sequences with those in the public databases revealed no significant homologies to any of these sequences.

### Example 2

### Determination of Tissue Specificity of Prostate-Specific Polypeptides

[0961] Using gene specific primers, mRNA expression levels for the representative prostate-specific polypeptides F1-16, H1-1, J1-17 (also referred to as P502S), L1-12 (also referred to as P501S), F1-12 (also referred to as P504S) and N1-1862 (also referred to as P503S) were examined in a variety of normal and tumor tissues using RT-PCR.

[0962] Briefly, total RNA was extracted from a variety of normal and tumor tissues using Trizol reagent as described above. First strand synthesis was carried out using 1-2 μg of total RNA with SuperScript II reverse transcriptase (BRL Life Technologies) at 42° C. for one hour. The cDNA was then amplified by PCR with gene-specific primers. To ensure the semi-quantitative nature of the RT-PCR, p-actin was used as an internal control for each of the tissues examined. First, serial dilutions of the first strand cDNAs were prepared and RT-PCR assays were performed using β-actin specific primers. A dilution was then chosen that enabled the linear range amplification of the β-actin template and which was sensitive enough to reflect the differences in the initial copy numbers. Using these conditions, the β-actin levels were determined for each reverse transcription reaction from each tissue. DNA contamination was minimized by DNase treatment and by assuring a negative PCR result when using first strand cDNA that was prepared without adding reverse transcriptase. mRNA Expression levels were examined in four different types of tumor tissue (prostate tumor from 2 patients, breast tumor from 3 patients, colon tumor, lung tumor), and sixteen different normal tissues, including prostate, colon, kidney, liver, lung, ovary, pancreas, skeletal muscle, skin, stomach, testes, bone marrow and brain. F1-16 was found to be expressed at high levels in prostate tumor tissue, colon tumor and normal prostate, and at lower levels in normal liver, skin and testes, with expression being undetectable in the other tissues examined. H1-1 was found to be expressed at high levels in prostate tumor, lung tumor, breast tumor, normal prostate, normal colon and normal brain, at much lower levels in normal lung, pancreas, skeletal muscle, skin, small intestine, bone marrow, and was not detected in the other tissues tested. J1-17 (P502S) and L1-12 (P501S) appear to be specifically over-expressed in prostate, with both genes being expressed at high levels in prostate tumor and normal prostate but at low to undetectable levels in all the other tissues examined. N1-1862 (P503S) was found to be over-expressed in 60% of prostate tumors and detectable in normal colon and kidney. The RT-PCR results thus indicate that F1-16, H1-1, J1-17 (P502S), N1-1862 (P503S) and L1-12 (P501S) are either prostate specific or are expressed at significantly elevated levels in prostate.

[0963] Further RT-PCR studies showed that F1-12 (P504S) is over-expressed in 60% of prostate tumors, detectable in normal kidney but not detectable in all other tissues tested. Similarly, R1-2330 was shown to be over-expressed in 40% of prostate tumors, detectable in normal kidney and liver, but not detectable in all other tissues tested. U1-3064 was found to be over-expressed in 60% of prostate tumors, and also expressed in breast and colon tumors, but was not detectable in normal tissues.

[0964] RT-PCR characterization of R1-2330, U1-3064 and ID-4279 showed that these three antigens are over-expressed in prostate and/or prostate tumors.

[0965] Northern analysis with four prostate tumors, two normal prostate samples, two BPH prostates, and normal colon, kidney, liver, lung, pancrease, skeletal muscle, brain, stomach, testes, small intestine and bone marrow, showed that L1-12 (P501S) is over-expressed in prostate tumors and normal prostate, while being undetectable in other normal tissues tested. J1-17 (P502S) was detected in two prostate tumors and not in the other tissues tested. N1-1862 (P503S) was found to be over-expressed in three prostate tumors and to be expressed in normal prostate, colon and kidney, but not in other tissues tested. F1-12 (P504S) was found to be highly expressed in two prostate tumors and to be undetectable in all other tissues tested.

[0966] The microarray technology described above was used to determine the expression levels of representative antigens described herein in prostate tumor, breast tumor and the following normal tissues: prostate, liver, pancreas, skin, bone marrow, brain, breast, adrenal gland, bladder, testes, salivary gland, large intestine, kidney, ovary, lung, spinal cord, skeletal muscle and colon. L1-12 (P501S) was found to be over-expressed in normal prostate and prostate tumor, with some expression being detected in normal skeletal muscle. Both J1-12 and F1-12 (P504S) were found to be over-expressed in prostate tumor, with expression being lower or undetectable in all other tissues tested. N1-1862 (P503S) was found to be expressed at high levels in prostate tumor and normal prostate, and at low levels in normal large intestine and normal colon, with expression being undetectable in all other tissues tested. R1-2330 was found to be over-expressed in prostate tumor and normal prostate, and to be expressed at lower levels in all other tissues tested. 1D-4279 was found to be over-expressed in prostate tumor and normal prostate, expressed at lower levels in normal spinal cord, and to be undetectable in all other tissues tested.

[0967] Further microarray analysis to specifically address the extent to which P501S (SEQ ID NO: 110) was expressed in breast tumor revealed moderate over-expression not only in breast tumor, but also in metastatic breast tumor (2/31), with negligible to low expression in normal tissues. This data suggests that P501S may be over-expressed in various breast tumors as well as in prostate tumors.

[0968] The expression levels of 32 ESTs (expressed sequence tags) described by Vasmatzis et al. (Proc. Natl. Acad. Sci. USA 95:300-304, 1998) in a variety of tumor and normal tissues were examined by microarray technology as described above. Two of these clones (referred to as P1000C and P1001C) were found to be over-expressed in prostate tumor and normal prostate, and expressed at low to undetectable levels in all other tissues tested (normal aorta, thymus, resting and activated PBMC, epithelial cells, spinal cord, adrenal gland, fetal tissues, skin, salivary gland, large intestine, bone marrow, liver, lung, dendritic cells, stomach, lymph nodes, brain, heart, small intestine, skeletal muscle, colon and kidney. The determined cDNA sequences for P1000C and P1001C are provided in SEQ ID NO: 384 and 472, respectively. The sequence of P1001C was found to show some homology to the previously isolated Human mRNA for JM27 protein. Subsequent comparison of the sequence of SEQ ID NO: 384 with sequences in the public databases, led to the identification of a full-length cDNA sequence of P1000C (SEQ ID NO: 929), which encodes a 492 amino acid sequence. Analysis of the amino acid sequence using the PSORT II program led to the identification of a putative transmembrane domain from amino acids 84-100. The cDNA sequence of the open reading frame of P1000C, including the stop codon, is provided in SEQ ID NO: 930, with the open reading frame without the stop codon being provided in SEQ ID NO: 931. The full-length amino acid sequence of P1000C is provided in SEQ ID NO: 932. SEQ ID NO: 933 and 934 represent amino acids 1-100 and 100-492 of P1000C, respectively.

[0969] The expression of the polypeptide encoded by the full length cDNA sequence for F1-12 (also referred to as P504S; SEQ ID NO: 108) was investigated by immunohistochemical analysis. Rabbit-anti-P504S polyclonal antibodies were generated against the full length P504S protein by standard techniques. Subsequent isolation and characterization of the polyclonal antibodies were also performed by techniques well known in the art. Immunohistochemical analysis showed that the P504S polypeptide was expressed in 100% of prostate carcinoma samples tested (n=5).

[0970] The rabbit-anti-P504S polyclonal antibody did not appear to label benign prostate cells with the same cytoplasmic granular staining, but rather with light nuclear staining. Analysis of normal tissues revealed that the encoded polypeptide was found to be expressed in some, but not all normal human tissues. Positive cytoplasmic staining with rabbit-anti-P504S polyclonal antibody was found in normal human kidney, liver, brain, colon and lung-associated macrophages, whereas heart and bone marrow were negative.

[0971] This data indicates that the P504S polypeptide is present in prostate cancer tissues, and that there are qualitative and quantitative differences in the staining between benign prostatic hyperplasia tissues and prostate cancer tissues, suggesting that this polypeptide may be detected selectively in prostate tumors and therefore be useful in the diagnosis of prostate cancer.

### Example 3

### Isolation and Characterization of Prostate-Specific Polypeptides by PCR-Based Subtraction

[0972] A cDNA subtraction library, containing cDNA from normal prostate subtracted with ten other normal tissue cDNAs (brain, heart, kidney, liver, lung, ovary, placenta, skeletal muscle, spleen and thymus) and then submitted to a first round of PCR amplification, was purchased from Clontech. This library was subjected to a second round of PCR amplification, following the manufacturer's protocol. The resulting cDNA fragments were subcloned into the vector pT7 Blue T-vector (Novagen, Madison, Wis.) and transformed into XL-1 Blue MRF′ E. coli (Stratagene). DNA was isolated from independent clones and sequenced using a Perkin Elmer/Applied Biosystems Division Automated Sequencer Model 373A.

[0973] Fifty-nine positive clones were sequenced. Comparison of the DNA sequences of these clones with those in the gene bank, as described above, revealed no significant homologies to 25 of these clones, hereinafter referred to as P5, P8, P9, P18, P20, P30, P34, P36, P38, P39, P42, P49, P50, P53, P55, P60, P64, P65, P73, P75, P76, P79 and P84. The determined cDNA sequences for these clones are provided in SEQ ID NO: 41-45, 47-52 and 54-65, respectively. P29, P47, P68, P80 and P82 (SEQ ID NO: 46, 53 and 66-68, respectively) were found to show some degree of homology to previously identified DNA sequences. To the best of the inventors' knowledge, none of these sequences have been previously shown to be present in prostate.

[0974] Further studies employing the sequence of SEQ ID NO: 67 as a probe in standard full-length cloning methods, resulted in the isolation of three cDNA sequences which appear to be splice variants of P80 (also known as P704P). These sequences are provided in SEQ ID NO: 699-701.

[0975] Further studies using the PCR-based methodology described above resulted in the isolation of more than 180 additional clones, of which 23 clones were found to show no significant homologies to known sequences. The determined cDNA sequences for these clones are provided in SEQ ID NO: 115-123, 127, 131, 137, 145, 147-151, 153, 156-158 and 160. Twenty-three clones (SEQ ID NO: 124-126, 128-130, 132-136, 138-144, 146, 152, 154, 155 and 159) were found to show some homology to previously identified ESTs. An additional ten clones (SEQ ID NO: 161-170) were found to have some degree of homology to known genes. Larger cDNA clones containing the P20 sequence represent splice variants of a gene referred to as P703P. The determined DNA sequence for the variants referred to as DE1, DE13 and DE14 are provided in SEQ ID NOS: 171, 175 and 177, respectively, with the corresponding predicted amino acid sequences being provided in SEQ ID NO: 172, 176 and 178, respectively. The determined cDNA sequence for an extended spliced form of P703 is provided in SEQ ID NO: 225. The DNA sequences for the splice variants referred to as DE2 and DE6 are provided in SEQ ID NOS: 173 and 174, respectively. mRNA Expression levels for representative clones in tumor tissues (prostate (n=5), breast (n=2), colon and lung) normal tissues (prostate (n=5), colon, kidney, liver, lung (n=2), ovary (n=2), skeletal muscle, skin, stomach, small intestine and brain), and activated and non-activated PBMC was determined by RT-PCR as described above. Expression was examined in one sample of each tissue type unless otherwise indicated.

[0976] P9 was found to be highly expressed in normal prostate and prostate tumor compared to all normal tissues tested except for normal colon which showed comparable expression. P20, a portion of the P703P gene, was found to be highly expressed in normal prostate and prostate tumor, compared to all twelve normal tissues tested. A modest increase in expression of P20 in breast tumor (n=2), colon tumor and lung tumor was seen compared to all normal tissues except lung (1 of 2). Increased expression of P18 was found in normal prostate, prostate tumor and breast tumor compared to other normal tissues except lung and stomach. A modest increase in expression of P5 was observed in normal prostate compared to most other normal tissues. However, some elevated expression was seen in normal lung and PBMC. Elevated expression of P5 was also observed in prostate tumors (2 of 5), breast tumor and one lung tumor sample. For P30, similar expression levels were seen in normal prostate and prostate tumor, compared to six of twelve other normal tissues tested. Increased expression was seen in breast tumors, one lung tumor sample and one colon tumor sample, and also in normal PBMC. P29 was found to be over-expressed in prostate tumor (5 of 5) and normal prostate (5 of 5) compared to the majority of normal tissues. However, substantial expression of P29 was observed in normal colon and normal lung (2 of 2). P80 was found to be over-expressed in prostate tumor (5 of 5) and normal prostate (5 of 5) compared to all other normal tissues tested, with increased expression also being seen in colon tumor.

[0977] Further studies resulted in the isolation of twelve additional clones, hereinafter referred to as 10-d8, 10-h10, 11-c8, 7-g6, 8-b5, 8-b6, 8-d4, 8-d9, 8-g3, 8-h11, 9-f12 and 9-f3. The determined DNA sequences for 10-d8, 10-h10, 11-c8, 8-d4, 8-d9, 8-h11, 9-f12 and 9-f3 are provided in SEQ ID NO: 207, 208, 209, 216, 217, 220, 221 and 222, respectively. The determined forward and reverse DNA sequences for 7-g6, 8-b5, 8-b6 and 8-g3 are provided in SEQ ID NO: 210 and 211; 212 and 213; 214 and 215; and 218 and 219, respectively. Comparison of these sequences with those in the gene bank revealed no significant homologies to the sequence of 9-f3 The clones 10-d8, 11-c8 and 8-h11 were found to show some homology to previously isolated ESTs, while 10-h10, 8-b5, 8-b6, 8-d4, 8-d9, 8-g3 and 9-f12 were found to show some homology to previously identified genes. Further characterization of 7-G6 and 8-G3 showed identity to the known genes PAP and PSA, respectively. mRNA expression levels for these clones were determined using the micro-array technology described above. The clones 7-G6, 8-G3, 8-B5, 8-B6, 8-D4, 8-D9, 9-F3, 9-F 12, 9-H3, 10-A2, 10-A4, 11-C9 and 11-F2 were found to be over-expressed in prostate tumor and normal prostate, with expression in other tissues tested being low or undetectable. Increased expression of 8-F11 was seen in prostate tumor and normal prostate, bladder, skeletal muscle and colon. Increased expression of 10-H10 was seen in prostate tumor and normal prostate, bladder, lung, colon, brain and large intestine. Increased expression of 9-B1 was seen in prostate tumor, breast tumor, and normal prostate, salivary gland, large intestine and skin, with increased expression of 11-C8 being seen in prostate tumor, and normal prostate and large intestine.

[0978] An additional cDNA fragment derived from the PCR-based normal prostate subtraction, described above, was found to be prostate specific by both micro-array technology and RT-PCR. The determined cDNA sequence of this clone (referred to as 9-A11) is provided in SEQ ID NO: 226. Comparison of this sequence with those in the public databases revealed 99% identity to the known gene HOXB13.

[0979] Further studies led to the isolation of the clones 8-C6 and 8-H7. The determined cDNA sequences for these clones are provided in SEQ ID NO: 227 and 228, respectively. These sequences were found to show some homology to previously isolated ESTs.

[0980] PCR and hybridization-based methodologies were employed to obtain longer cDNA sequences for clone P20 (also referred to as P703P), yielding three additional cDNA fragments that progressively extend the 5′ end of the gene. These fragments, referred to as P703PDE5, P703P6.26, and P703PX-23 (SEQ ID NO: 326, 328 and 330, with the predicted corresponding amino acid sequences being provided in SEQ ID NO: 327, 329 and 331, respectively) contain additional 5′ sequence. P703PDE5 was recovered by screening of a cDNA library (#141-26) with a portion of P703P as a probe. P703P6.26 was recovered from a mixture of three prostate tumor cDNAs and P703PX 23 was recovered from cDNA library (#438-48). Together, the additional sequences include all of the putative mature serine protease along with part of the putative signal sequence. The full-length cDNA sequence for P703P is provided in SEQ ID NO: 524, with the corresponding amino acid sequence being provided in SEQ ID NO: 525.

[0981] Using computer algorithms, the following regions of P703P were predicted to represent potential HLA A2-binding CTL epitopes: amino acids 164-172 of SEQ ID NO: 525 (SEQ ID NO: 866); amino acids 160-168 of SEQ ID NO: 525 (SEQ ID NO: 867); amino acids 239-247 of SEQ ID NO: 525 (SEQ ID NO: 868); amino acids 118-126 of SEQ ID NO: 525 (SEQ ID NO: 869); amino acids 112-120 of SEQ ID NO: 525 (SEQ ID NO: 870); amino acids 155-164 of SEQ ID NO: 525 (SEQ ID NO: 871); amino acids 117-126 of SEQ ID NO: 525 (SEQ ID NO: 872); amino acids 164-173 of SEQ ID NO: 525 (SEQ ID NO: 873); amino acids 154-163 of SEQ ID NO: 525 (SEQ ID NO: 874); amino acids 163-172 of SEQ ID NO: 525 (SEQ ID NO: 875); amino acids 58-66 of SEQ ID NO: 525 (SEQ ID NO: 876); and amino acids 59-67 of SEQ ID NO: 525 (SEQ ID NO: 877).

[0982] P703P was found to show some homology to previously identified proteases, such as thrombin. The thrombin receptor has been shown to be preferentially expressed in highly metastatic breast carcinoma cells and breast carcinoma biopsy samples. Introduction of thrombin receptor antisense cDNA has been shown to inhibit the invasion of metastatic breast carcinoma cells in culture. Antibodies against thrombin receptor inhibit thrombin receptor activation and thrombin-induced platelet activation. Furthermore, peptides that resemble the receptor's tethered ligand domain inhibit platelet aggregation by thrombin. P703P may play a role in prostate cancer through a protease-activated receptor on the cancer cell or on stromal cells. The potential trypsin-like protease activity of P703P may either activate a protease-activated receptor on the cancer cell membrane to promote tumorgenesis or activate a protease-activated receptor on the adjacent cells (such as stromal cells) to secrete growth factors and/or proteases (such as matrix metalloproteinases) that could promote tumor angiogenesis, invasion and metastasis. P703P may thus promote tumor progression and/or metastasis through the activation of protease-activated receptor. Polypeptides and antibodies that block the P703P-receptor interaction may therefore be usefully employed in the treatment of prostate cancer.

[0983] To determine whether P703P expression increases with increased severity of Gleason grade, an indicator of tumor stage, quantitative PCR analysis was performed on prostate tumor samples with a range of Gleason scores from 5 to >8. The mean level of P703P expression increased with increasing Gleason score, indicating that P703P expression may correlate with increased disease severity.

[0984] Further studies using a PCR-based subtraction library of a prostate tumor pool subtracted against a pool of normal tissues (referred to as JP: PCR subtraction) resulted in the isolation of thirteen additional clones, seven of which did not share any significant homology to known GenBank sequences. The determined cDNA sequences for these seven clones (P711P, P712P, novel 23, P774P, P775P, P710P and P768P) are provided in SEQ ID NO: 307-311, 313 and 315, respectively. The remaining six clones (SEQ ID NO: 316 and 321-325) were shown to share some homology to known genes. By microarray analysis, all thirteen clones showed three or more fold over-expression in prostate tissues, including prostate tumors, BPH and normal prostate as compared to normal non-prostate tissues. Clones P711P, P712P, novel 23 and P768P showed over-expression in most prostate tumors and BPH tissues tested (n=29), and in the majority of normal prostate tissues (n=4), but background to low expression levels in all normal tissues. Clones P774P, P775P and P710P showed comparatively lower expression and expression in fewer prostate tumors and BPH samples, with negative to low expression in normal prostate.

[0985] Further studies led to the isolation of an extended cDNA sequence for P712P (SEQ ID NO: 552). The amino acid sequences encoded by 16 predicted open reading frames present within the sequence of SEQ ID NO: 552 are provided in SEQ ID NO: 553-568.

[0986] The full-length cDNA for P711P was obtained by employing the partial sequence of SEQ ID NO: 307 to screen a prostate cDNA library. Specifically, a directionally cloned prostate cDNA library was prepared using standard techniques. One million colonies of this library were plated onto LB/Amp plates. Nylon membrane filters were used to lift these colonies, and the cDNAs which were picked up by these filters were denatured and cross-linked to the filters by UV light. The P711P cDNA fragment of SEQ ID NO: 307 was radio-labeled and used to hybridize with these filters. Positive clones were selected, and cDNAs were prepared and sequenced using an automatic Perkin Elmer/Applied Biosystems sequencer. The determined full-length sequence of P711P is provided in SEQ ID NO: 382, with the corresponding predicted amino acid sequence being provided in SEQ ID NO: 383.

[0987] Using PCR and hybridization-based methodologies, additional cDNA sequence information was derived for two clones described above, 11-C9 and 9-F3, herein after referred to as P707P and P714P, respectively (SEQ ID NO: 333 and 334). After comparison with the most recent GenBank, P707P was found to be a splice variant of the known gene HoxB 13. In contrast, no significant homologies to P714P were found. Further studies employing the sequence of SEQ ID NO: 334 as a probe in standard full-length cloning methods, resulted in an extended cDNA sequence for P714P. This sequence is provided in SEQ ID NO: 698. This sequence was found to show some homology to the gene that encodes human ribosomal L23A protein.

[0988] Clones 8-B3, P89, P98, P130 and P201 (as disclosed in U.S. patent application Ser. No. 09/020,956, filed Feb. 9, 1998) were found to be contained within one contiguous sequence, referred to as P705P (SEQ ID NO: 335, with the predicted amino acid sequence provided in SEQ ID NO: 336), which was determined to be a splice variant of the known gene NKX 3.1.

[0989] Further studies on P775P resulted in the isolation of four additional sequences (SEQ ID NO: 473-476) which are all splice variants of the P775P gene. The sequence of SEQ ID NO: 474 was found to contain two open reading frames (ORFs). The predicted amino acid sequences encoded by these ORFs are provided in SEQ ID NO: 477 and 478. The cDNA sequence of SEQ ID NO: 475 was found to contain an ORF which encodes the amino acid sequence of SEQ ID NO: 479. The cDNA sequence of SEQ ID NO: 473 was found to contain four ORFs. The predicted amino acid sequences encoded by these ORFs are provided in SEQ ID NO: 480-483. Additional splice variants of P775P are provided in SEQ ID NO: 593-597.

[0990] Subsequent studies led to the identification of a genomic region on chromosome 22q11.2, known as the Cat Eye Syndrome region, that contains the five prostate genes P704P, P712P, P774P, P775P and B305D. The relative location of each of these five genes within the genomic region is shown in FIG. 10. This region may therefore be associated with malignant tumors, and other potential tumor genes may be contained within this region. These studies also led to the identification of a potential open reading frame (ORF) for P775P (provided in SEQ ID NO: 533), which encodes the amino acid sequence of SEQ ID NO: 534.

[0991] Comparison of the clone of SEQ ID NO: 325 (referred to as P558S) with sequences in the GenBank and GeneSeq DNA databases showed that P558S is identical to the prostate-specific transglutaminase gene, which is known to have two forms. The full-length sequences for the two forms are provided in SEQ ID NO: 773 and 774, with the corresponding amino acid sequences being provided in SEQ ID NO: 775 and 776, respectively. The cDNA sequence of SEQ ID NO: 774 has a 15 pair base insert, resulting in a 5 amino acid insert in the corresponding amino acid sequence (SEQ ID NO: 776). This insert is not present in the sequence of SEQ ID NO: 773.

[0992] Further studies on P768P (SEQ ID NO: 315) led to the identification of the putative full-length open reading frame (ORF). The cDNA sequence of the ORF with stop codon is provided in SEQ ID NO: 907. The cDNA sequence of the ORF without stop codon is provided in SEQ ID NO: 908, with the corresponding amino acid sequence being provided in SEQ ID NO: 909. This sequence was found to show 86% identity to a rat calcium transporter protein, indicating that P768P may represent a human calcium transporter protein. The locations of transmembrane domains within P768P were predicted using the PSORT II computer algorithm. Six transmembrane domains were predicted at amino acid positions 118-134, 172-188, 211-227, 230-246, 282-298 and 348-364. The amino acid sequences of SEQ ID NO: 910-915 represent amino acids 1-134, 135-188, 189-227,228-246,247-298 and 299-511 of P768P, respectively.

### Example 4

### Synthesis of Polypeptides

[0993] Polypeptides may be synthesized on a Perkin Elmer/Applied Biosystems 430A peptide synthesizer using FMOC chemistry with HPTU (O-Benzotriazole-N,N,N′,N′-tetramethyluronium hexafluorophosphate) activation. A Gly-Cys-Gly sequence may be attached to the amino terminus of the peptide to provide a method of conjugation, binding to an immobilized surface, or labeling of the peptide. Cleavage of the peptides from the solid support may be carried out using the following cleavage mixture: trifluoroacetic acid:ethanedithiol:thioanisole:water:phenol (40:1:2:2:3). After cleaving for 2 hours, the peptides may be precipitated in cold methyl-t-butyl-ether. The peptide pellets may then be dissolved in water containing 0.1% trifluoroacetic acid (TFA) and lyophilized prior to purification by C18 reverse phase HPLC. A gradient of 0%-60% acetonitrile (containing 0.1% TFA) in water (containing 0.1% TFA) may be used to elute the peptides. Following lyophilization of the pure fractions, the peptides may be characterized using electrospray or other types of mass spectrometry and by amino acid analysis.

### Example 5

### Further Isolation and Characterization of Prostate-Specific Polypeptides by PCR-Based Subtraction

[0994] A cDNA library generated from prostate primary tumor mRNA as described above was subtracted with cDNA from normal prostate. The subtraction was performed using a PCR-based protocol (Clontech), which was modified to generate larger fragments. Within this protocol, tester and driver double stranded cDNA were separately digested with five restriction enzymes that recognize six-nucleotide restriction sites (MluI, MscI, PvuII, SalI and StuI). This digestion resulted in an average cDNA size of 600 bp, rather than the average size of 300 bp that results from digestion with RsaI according to the Clontech protocol. This modification did not affect the subtraction efficiency. Two tester populations were then created with different adapters, and the driver library remained without adapters.

[0995] The tester and driver libraries were then hybridized using excess driver cDNA. In the first hybridization step, driver was separately hybridized with each of the two tester cDNA populations. This resulted in populations of (a) unhybridized tester cDNAs, (b) tester cDNAs hybridized to other tester cDNAs, (c) tester cDNAs hybridized to driver cDNAs and (d) unhybridized driver cDNAs. The two separate hybridization reactions were then combined, and rehybridized in the presence of additional denatured driver cDNA. Following this second hybridization, in addition to populations (a) through (d), a fifth population (e) was generated in which tester cDNA with one adapter hybridized to tester cDNA with the second adapter. Accordingly, the second hybridization step resulted in enrichment of differentially expressed sequences which could be used as templates for PCR amplification with adaptor-specific primers.

[0996] The ends were then filled in, and PCR amplification was performed using adaptor-specific primers. Only population (e), which contained tester cDNA that did not hybridize to driver cDNA, was amplified exponentially. A second PCR amplification step was then performed, to reduce background and further enrich differentially expressed sequences.

[0997] This PCR-based subtraction technique normalizes differentially expressed cDNAs so that rare transcripts that are overexpressed in prostate tumor tissue may be recoverable. Such transcripts would be difficult to recover by traditional subtraction methods.

[0998] In addition to genes known to be overexpressed in prostate tumor, seventy-seven further clones were identified. Sequences of these partial cDNAs are provided in SEQ ID NO: 29 to 305. Most of these clones had no significant homology to database sequences. Exceptions were JPTPN23 (SEQ ID NO: 231; similarity to pig valosin-containing protein), JPTPN30 (SEQ ID NO: 234; similarity to rat mRNA for proteasome subunit), JPTPN45 (SEQ ID NO: 243; similarity to rat norvegicus cytosolic NADP-dependent isocitrate dehydrogenase), JPTPN46 (SEQ ID NO: 244; similarity to human subclone H8 4 d4 DNA sequence), JP1D6 (SEQ ID NO: 265; similarity to G. gallus dynein light chain-A), JP8D6 (SEQ ID NO: 288; similarity to human BAC clone RGO16JO4), JP8F5 (SEQ ID NO: 289; similarity to human subclone H8 3 b5 DNA sequence), and JP8E9 (SEQ ID NO: 299; similarity to human Alu sequence).

[0999] Additional studies using the PCR-based subtraction library consisting of a prostate tumor pool subtracted against a normal prostate pool (referred to as PT-PN PCR subtraction) yielded three additional clones. Comparison of the cDNA sequences of these clones with the most recent release of GenBank revealed no significant homologies to the two clones referred to as P715P and P767P (SEQ ID NO: 312 and 314). The remaining clone was found to show some homology to the known gene KIAA0056 (SEQ ID NO: 318). Using microarray analysis to measure mRNA expression levels in various tissues, all three clones were found to be over-expressed in prostate tumors and BPH tissues. Specifically, clone P715P was over-expressed in most prostate tumors and BPH tissues by a factor of three or greater, with elevated expression seen in the majority of normal prostate samples and in fetal tissue, but negative to low expression in all other normal tissues. Clone P767P was over-expressed in several prostate tumors and BPH tissues, with moderate expression levels in half of the normal prostate samples, and background to low expression in all other normal tissues tested.

[1000] Further analysis, by microarray as described above, of the PT-PN PCR subtraction library and of a DNA subtraction library containing cDNA from prostate tumor subtracted with a pool of normal tissue cDNAs, led to the isolation of 27 additional clones (SEQ ID NO: 340-365 and 381) which were determined to be over-expressed in prostate tumor. The clones of SEQ ID NO: 341, 342, 345, 347, 348, 349, 351, 355-359, 361, 362 and 364 were also found to be expressed in normal prostate. Expression of all 26 clones in a variety of normal tissues was found to be low or undetectable, with the exception of P544S (SEQ ID NO: 356) which was found to be expressed in small intestine. Of the 26 clones, 11 (SEQ ID NO: 340-349 and 362) were found to show some homology to previously identified sequences. No significant homologies were found to the clones of SEQ ID NO: 350, 351, 353-361, and 363-365.

[1001] Comparison of the sequence of SEQ ID NO: 362 with sequences in the GenBank and GeneSeq DNA databases showed that this clone (referred to as P788P) is identical to GeneSeq Accession No. X27262, which encodes a protein found in the GeneSeq protein Accession No. Y00931. The full length cDNA sequence of P788P is provided in SEQ ID NO: 777, with the corresponding predicted amino acid being provided in SEQ ID NO: 778. Subsequently, a full-length cDNA sequence for P788P that contains polymorphisms not found in the sequence of SEQ ID NO: 779, was cloned multiple times by PCR amplification from cDNA prepared from several RNA templates from three individuals. This determined cDNA sequence of this polymorphic variant of P788P is provided in SEQ ID NO: 779, with the corresponding amino acid sequence being provided in SEQ ID NO: 780. The sequence of SEQ ID NO: 780 differs from that of SEQ ID NO: 778 by six amino acid residues. The P788P protein has 7 potential transmembrane domains at the C-terminal portion and is predicted to be a plasma membrane protein with an extracellular N-terminal region.

[1002] Further studies on the clone of SEQ ID NO: 352 (referred to as P790P) led to the isolation of the full-length cDNA sequence of SEQ ID NO: 526. The corresponding predicted amino acid is provided in SEQ ID NO: 527. Data from two quantitative PCR experiments indicated that P790P is over-expressed in 11/15 tested prostate tumor samples and is expressed at low levels in spinal cord, with no expression being seen in all other normal samples tested. Data from further PCR experiments and microarray experiments showed over-expression in normal prostate and prostate tumor with little or no expression in other tissues tested. P790P was subsequently found to show significant homology to a previously identified G-protein coupled prostate tissue receptor.

[1003] Additional studies on the clone of SEQ ID NO: 354 (referred to as P776P) led to the isolation of an extended cDNA sequence, provided in SEQ ID NO: 569. The determined cDNA sequences of three additional splice variants of P776P are provided in SEQ ID NO: 570-572. The amino acid sequences encoded by two predicted open reading frames (ORFs) contained within SEQ ID NO: 570, one predicted ORF contained within SEQ ID NO: 571, and 11 predicted ORFs contained within SEQ ID NO: 569, are provided in SEQ ID NO: 573-586, respectively. Further studies led to the isolation of the full-length sequence for the clone of SEQ ID NO: 570 (provided in SEQ ID NO: 880). Full-length cloning efforts on the clone of SEQ ID NO: 571 led to the isolation of two sequences (provided in SEQ ID NO: 881 and 882), representing a single clone, that are identical with the exception of a polymorphic insertion/deletion at position 1293. Specifically, the clone of SEQ ID NO: 882 (referred to as clone F1) has a C at position 1293. The clone of SEQ ID NO: 881 (referred to as clone F2) has a single base pair deletion at position 1293. The predicted amino acid sequences encoded by 5 open reading frames located within SEQ ID NO: 880 are provided in SEQ ID NO: 883-887, with the predicted amino acid sequences encoded by the clone of SEQ ID NO: 881 and 882 being provided in SEQ ID NO: 888-893.

[1004] Comparison of the cDNA sequences for the clones P767P (SEQ ID NO: 314) and P777P (SEQ ID NO: 350) with sequences in the GenBank human EST database showed that the two clones matched many EST sequences in common, suggesting that P767P and P777P may represent the same gene. A DNA consensus sequence derived from a DNA sequence alignment of P767P, P777P and multiple EST clones is provided in SEQ ID NO: 587. The amino acid sequences encoded by three putative ORFs located within SEQ ID NO: 587 are provided in SEQ ID NO: 588-590.

[1005] The clone of SEQ ID NO: 342 (referred to as P789P) was found to show homology to a previously identified gene. The full length cDNA sequence for P789P and the corresponding amino acid sequence are provided in SEQ ID NO: 878 and 879, respectively.

### Example 6

### Peptide Priming of Mice and Propagation of CTL Lines

[1006] 6.1. This Example Illustrates the Preparation of a CTL Cell Line Specific for Cells Expressing the P502S Gene.

[1007] Mice expressing the transgene for human HLA A2 Kb (provided by Dr L. Sherman, The Scripps Research Institute, La Jolla, Calif.) were immunized with P2S#12 peptide (VLGWVAEL; SEQ ID NO: 306), which is derived from the P502S gene (also referred to herein as J1-17, SEQ ID NO: 8), as described by Theobald et al., Proc. Natl. Acad. Sci. USA 92:11993-11997, 1995 with the following modifications. Mice were immunized with 100 g of P2S#12 and 120 μg of an I-Ab binding peptide derived from hepatitis B Virus protein emulsified in incomplete Freund's adjuvant. Three weeks later these mice were sacrificed and using a nylon mesh single cell suspensions prepared. Cells were then resuspended at 6×10⁶ cells/ml in complete media (RPMI-1640; Gibco BRL, Gaithersburg, Md.) containing 10% FCS, 2mM Glutamine (Gibco BRL), sodium pyruvate (Gibco BRL), non-essential amino acids (Gibco BRL), 2×10⁻⁵ M 2-mercaptoethanol, 50 U/ml penicillin and streptomycin, and cultured in the presence of irradiated (3000 rads) P2S#12-pulsed (5 mg/ml P2S#12 and 10 mg/ml β2-microglobulin) LPS blasts (A2 transgenic spleens cells cultured in the presence of 7 μg/ml dextran sulfate and 25 μg/ml LPS for 3 days). Six days later, cells (5×10⁵/ml) were restimulated with 2.5×10⁶/ml peptide pulsed irradiated (20,000 rads) EL4A2Kb cells (Sherman et al, Science 258:815-818, 1992) and 3×10⁶/ml A2 transgenic spleen feeder cells. Cells were cultured in the presence of 20U/ml IL-2. Cells continued to be restimulated on a weekly basis as described, in preparation for cloning the line.

[1008] P2S#12 line was cloned by limiting dilution analysis with peptide pulsed EL4 A2Kb tumor cells (1×10⁴ cells/well) as stimulators and A2 transgenic spleen cells as feeders (5×10⁵ cells/well) grown in the presence of 30U/ml IL-2. On day 14, cells were restimulated as before. On day 21, clones that were growing were isolated and maintained in culture. Several of these clones demonstrated significantly higher reactivity (lysis) against human fibroblasts (HLA A2Kb expressing) transduced with P502S than against control fibroblasts. An example is presented in FIG. 1.

[1009] This data indicates that P2S #12 represents a naturally processed epitope of the P502S protein that is expressed in the context of the human HLA A2Kb molecule. 6.2. This Example illustrates the preparation of murine CTL lines and CTL clones specific for cells expressing the P501S gene.

[1010] This series of experiments were performed similarly to that described above. Mice were immunized with the P1S#10 peptide (SEQ ID NO: 337), which is derived from the P501S gene (also referred to herein as L1-12, SEQ ID NO: 110). The P1 S#10 peptide was derived by analysis of the predicted polypeptide sequence for P501S for potential HLA-A2 binding sequences as defined by published HLA-A2 binding motifs (Parker, KC, et al, J. Immunol., 152:163, 1994). P1S#10 peptide was synthesized as described in Example 4, and empirically tested for HLA-A2 binding using a T cell based competition assay. Predicted A2 binding peptides were tested for their ability to compete HLA-A2 specific peptide presentation to an HLA-A2 restricted CTL clone (D150M58), which is specific for the HLA-A2 binding influenza matrix peptide fluM58. D150M58 CTL secretes TNF in response to self-presentation of peptide fluM58. In the competition assay, test peptides at 100-200 μg/ml were added to cultures of D150M58 CTL in order to bind HLA-A2 on the CTL. After thirty minutes, CTL cultured with test peptides, or control peptides, were tested for their antigen dose response to the fluM58 peptide in a standard TNF bioassay. As shown in FIG. 3, peptide P1S#10 competes HLA-A2 restricted presentation of fluM58, demonstrating that peptide P1 S#10 binds HLA-A2.

[1011] Mice expressing the transgene for human HLA A2Kb were immunized as described by Theobald et al. (Proc. Natl. Acad. Sci. USA 92:11993-11997, 1995) with the following modifications. Mice were immunized with 62.5 μg of P1S#10 and 120 μg of an I-A^{b} binding peptide derived from Hepatitis B Virus protein emulsified in incomplete Freund's adjuvant. Three weeks later these mice were sacrificed and single cell suspensions prepared using a nylon mesh. Cells were then resuspended at 6×10⁶ cells/ml in complete media (as described above) and cultured in the presence of irradiated (3000 rads) P1S#10-pulsed (2 μg/ml PlS#10 and 10 mg/ml P2-microglobulin) LPS blasts (A2 transgenic spleens cells cultured in the presence of 7 μg/ml dextran sulfate and 25 μg/ml LPS for 3 days). Six days later cells (5×10⁵/ml) were restimulated with 2.5×10⁶/ml peptide-pulsed irradiated (20,000 rads) EL4A2Kb cells, as described above, and 3×10⁶/ml A2 transgenic spleen feeder cells. Cells were cultured in the presence of 20 U/ml IL-2. Cells were restimulated on a weekly basis in preparation for cloning. After three rounds of in vitro stimulations, one line was generated that recognized P1S#10-pulsed Jurkat A2Kb targets and P501S-transduced Jurkat targets as shown in FIG. 4.

[1012] A P1S#10-specific CTL line was cloned by limiting dilution analysis with peptide pulsed EL4 A2Kb tumor cells (1×10⁴ cells/well) as stimulators and A2 transgenic spleen cells as feeders (5×10⁵ cells/well) grown in the presence of 30 U/ml IL-2. On day 14, cells were restimulated as before. On day 21, viable clones were isolated and maintained in culture. As shown in FIG. 5, five of these clones demonstrated specific cytolytic reactivity against P501S-transduced Jurkat A2Kb targets. This data indicates that P1S#10 represents a naturally processed epitope of the P501S protein that is expressed in the context of the human HLA-A2.1 molecule.

### Example 7

### Priming of CTL in Vivo Using Naked DNA Immunization with a Prostate Antigen

[1013] The prostate-specific antigen L1-12, as described above, is also referred to as P501S. HLA A2Kb Tg mice (provided by Dr L. Sherman, The Scripps Research Institute, La Jolla, Calif.) were immunized with 100 μg P501S in the vector VR1012 either intramuscularly or intradermally. The mice were immunized three times, with a two week interval between immunizations. Two weeks after the last immunization, immune spleen cells were cultured with Jurkat A2Kb-P501S transduced stimulator cells. CTL lines were stimulated weekly. After two weeks of in vitro stimulation, CTL activity was assessed against P501S transduced targets. Two out of 8 mice developed strong anti-P501S CTL responses. These results demonstrate that P501S contains at least one naturally processed HLA-A2-restricted CTL epitope.

### Example 8

### Ability of Human T Cells to Recognize Prostate-Specific Polypeptides

[1014] This Example illustrates the ability of T cells specific for a prostate tumor polypeptide to recognize human tumor.

[1015] Human CD8⁺ T cells were primed in vitro to the P2S-12 peptide (SEQ ID NO: 306) derived from P502S (also referred to as J1-17) using dendritic cells according to the protocol of Van Tsai et al. (Critical Reviews in Immunology 18:65-75, 1998). The resulting CD8⁺ T cell microcultures were tested for their ability to recognize the P2S-12 peptide presented by autologous fibroblasts or fibroblasts which were transduced to express the P502S gene in a γ-interferon ELISPOT assay (see Lalvani et al., J. Exp. Med. 186:859-865, 1997). Briefly, titrating numbers of T cells were assayed in duplicate on 10⁴ fibroblasts in the presence of 3 μg/ml human β₂-microglobulin and 1 μg/ml P2S-12 peptide or control E75 peptide. In addition, T cells were simultaneously assayed on autologous fibroblasts transduced with the P502S gene or as a control, fibroblasts transduced with HER-2/neu. Prior to the assay, the fibroblasts were treated with 10 ng/ml γ-interferon for 48 hours to upregulate class I MHC expression. One of the microcultures (#5) demonstrated strong recognition of both peptide pulsed fibroblasts as well as transduced fibroblasts in a γ-interferon ELISPOT assay. FIG. 2A demonstrates that there was a strong increase in the number of 7-interferon spots with increasing numbers of T cells on fibroblasts pulsed with the P2S-12 peptide (solid bars) but not with the control E75 peptide (open bars). This shows the ability of these T cells to specifically recognize the P2S-12 peptide. As shown in FIG. 2B, this microculture also demonstrated an increase in the number of γ-interferon spots with increasing numbers of T cells on fibroblasts transduced to express the P502S gene but not the HER-2/neu gene. These results provide additional confirmatory evidence that the P2S-12 peptide is a naturally processed epitope of the P502S protein. Furthermore, this also demonstrates that there exists in the human T cell repertoire, high affinity T cells which are capable of recognizing this epitope. These T cells should also be capable of recognizing human tumors which express the P502S gene.

### Example 9

### Elicitation of Prostate Antigen-Specific CTL Responses in Human Blood

[1016] This Example illustrates the ability of a prostate-specific antigen to elicit a CTL response in blood of normal humans.

[1017] Autologous dendritic cells (DC) were differentiated from monocyte cultures derived from PBMC of normal donors by growth for five days in RPMI medium containing 10% human serum, 50 ng/ml GMCSF and 30 ng/ml IL-4. Following culture, DC were infected overnight with recombinant P501S-expressing vaccinia virus at an M.O.I. of 5 and matured for 8 hours by the addition of 2 micrograms/ml CD40 ligand. Virus was inactivated by UV irradiation, CD8⁺ cells were isolated by positive selection using magnetic beads, and priming cultures were initiated in 24-well plates. Following five stimulation cycles using autologous fibroblasts retrovirally transduced to express P501S and CD80, CD8⁺ lines were identified that specifically produced interferon-gamma when stimulated with autologous P501S-transduced fibroblasts. The P501S-specific activity of cell line 3A-1 could be maintained following additional stimulation cycles on autologous B-LCL transduced with P501S. Line 3A-1 was shown to specifically recognize autologous B-LCL transduced to express P501S, but not EGFP-transduced autologous B-LCL, as measured by cytotoxicity assays (⁵¹Cr release) and interferon-gamma production (Interferon-gamma Elispot; see above and Lalvani et al., J. Exp. Med. 186:859-865, 1997). The results of these assays are presented in FIGS. 6A and 6B.

### Example 10

### Identification of a Naturally Processed CTL Epitope Contained Within the Prostate-Specific Antigen P703P

[1018] The 9-mer peptide p5 (SEQ ID NO: 338) was derived from the P703P antigen (also referred to as P20). The p5 peptide is immunogenic in human HLA-A2 donors and is a naturally processed epitope. Antigen specific human CD8+ T cells can be primed following repeated in vitro stimulations with monocytes pulsed with p5 peptide. These CTL specifically recognize p5-pulsed and P703P-transduced target cells in both ELISPOT (as described above) and chromium release assays. Additionally, immunization of HLA-A2Kb transgenic mice with p5 leads to the generation of CTL lines which recognize a variety of HLA-A2Kb or HLA-A2 transduced target cells expressing P703P.

[1019] Initial studies demonstrating that p5 is a naturally processed epitope were done using HLA-A2Kb transgenic mice. HLA-A2Kb transgenic mice were immunized subcutaneously in the footpad with 100 μg of p5 peptide together with 140 μg of hepatitis B virus core peptide (a Th peptide) in Freund's incomplete adjuvant. Three weeks post immunization, spleen cells from immunized mice were stimulated in vitro with peptide-pulsed LPS blasts. CTL activity was assessed by chromium release assay five days after primary in vitro stimulation. Retrovirally transduced cells expressing the control antigen P703P and HLA-A2Kb were used as targets. CTL lines that specifically recognized both p5-pulsed targets as well as P703P-expressing targets were identified.

[1020] Human in vitro priming experiments demonstrated that the p5 peptide is immunogenic in humans. Dendritic cells (DC) were differentiated from monocyte cultures derived from PBMC of normal human donors by culturing for five days in RPMI medium containing 10% human serum, 50 ng/ml human GM-CSF and 30 ng/ml human IL-4. Following culture, the DC were pulsed with 1 ug/ml p5 peptide and cultured with CD8⁺ T cell enriched PBMC. CTL lines were restimulated on a weekly basis with p5-pulsed monocytes. Five to six weeks after initiation of the CTL cultures, CTL recognition of p5-pulsed target cells was demonstrated. CTL were additionally shown to recognize human cells transduced to express P703P, demonstrating that p5 is a naturally processed epitope.

[1021] Studies identifying a further peptide epitope (referred to as peptide 4) derived from the prostate tumor-specific antigen P703P that is capable of being recognized by CD4 T cells on the surface of cells in the context of HLA class II molecules were carried out as follows. The amino acid sequence for peptide 4 is provided in SEQ ID NO: 781, with the corresponding cDNA sequence being provided in SEQ ID NO: 782.

[1022] Twenty 15-mer peptides overlapping by 10 amino acids and derived from the carboxy-terminal fragment of P703P were generated using standard procedures. Dendritic cells (DC) were derived from PBMC of a normal female donor using GM-CSF and IL-4 by standard protocols. CD4 T cells were generated from the same donor as the DC using MACS beads and negative selection. DC were pulsed overnight with pools of the 15-mer peptides, with each peptide at a final concentration of 0.25 microgram/ml. Pulsed DC were washed and plated at 1×10⁴ cells/well of 96-well V-bottom plates and purified CD4 T cells were added at 1×10⁵/well. Cultures were supplemented with 60 ng/ml IL-6 and 10 ng/ml IL-12 and incubated at 37° C. Cultures were restimulated as above on a weekly basis using DC generated and pulsed as above as antigen presenting cells, supplemented with 5 ng/ml IL-7 and 10 u/ml IL-2. Following 4 in vitro stimulation cycles, 96 lines (each line corresponding to one well) were tested for specific proliferation and cytokine production in response to the stimulating pools with an irrelevant pool of peptides derived from mammaglobin being used as a control.

[1023] One line (referred to as 1-F9) was identified from pool #1 that demonstrated specific proliferation (measured by 3H proliferation assays) and cytokine production (measured by interferon-gamma ELISA assays) in response to pool #1 of P703P peptides. This line was further tested for specific recognition of the peptide pool, specific recognition of individual peptides in the pool, and in HLA mismatch analyses to identify the relevant restricting allele. Line 1-F9 was found to specifically proliferate and produce interferon-gamma in response to peptide pool #1, and also to peptide 4 (SEQ ID NO: 781). Peptide 4 corresponds to amino acids 126-140 of SEQ ID NO: 327. Peptide titration experiments were conducted to assess the sensitivity of line 1-F9 for the specific peptide. The line was found to specifically respond to peptide 4 at concentrations as low as 0.25 ng/ml, indicating that the T cells are very sensitive and therefore likely to have high affinity for the epitope.

[1024] To determine the HLA restriction of the P703P response, a panel of antigen presenting cells (APC) was generated that was partially matched with the donor used to generate the T cells. The APC were pulsed with the peptide and used in proliferation and cytokine assays together with line 1-F9. APC matched with the donor at HLA-DRB0701 and HLA-DQB02 alleles were able to present the peptide to the T cells, indicating that the P703P-specific response is restricted to one of these alleles.

[1025] Antibody blocking assays were utilized to determine if the restricting allele was HLA-DR0701 or HLA-DQ02. The anti-HLA-DR blocking antibody L243 or an irrelevant isotype matched IgG2a were added to T cells and APC cultures pulsed with the peptide RMPTVLQCVNVSVVS (SEQ ID NO: 781) at 250 ng/ml. Standard interferon-gamma and proliferation assays were performed. Whereas the control antibody had no effect on the ability of the T cells to recognize peptide-pulsed APC, in both assays the anti-HLA-DR antibody completely blocked the ability of the T cells to specifically recognize peptide-pulsed APC.

[1026] To determine if the peptide epitope RMPTVLQCVNVSVVS (SEQ ID NO: 781) was naturally processed, the ability of line 1-F9 to recognize APC pulsed with recombinant P703P protein was examined. For these experiments a number of recombinant P703P sources were utilized; E. coli-derived P703P, Pichia-derived P703P and baculovirus-derived P703P. Irrelevant protein controls used were E. coli-derived L3E a lung-specific antigen) and baculovirus-derived mammaglobin. In interferon-gamma ELISA assays, line 1-F9 was able to efficiently recognize both E. coli forms of P703P as well as Pichia-derived recombinant P703P, while baculovirus-derived P703P was recognized less efficiently. Subsequent Western blot analysis revealed that the E. coli and Pichia P703P protein preparations were intact while the baculovirus P703P preparation was approximately 75% degraded. Thus, peptide RMPTVLQCVNVSVVS (SEQ ID NO: 781) from P703P is a naturally processed peptide epitope derived from P703P and presented to T cells in the context of HLA-DRB-0701.

[1027] In further studies, twenty-four 15-mer peptides overlapping by 10 amino acids and derived from the N-terminal fragment of P703P (corresponding to amino acids 27-154 of SEQ ID NO: 525) were generated by standard procedures and their ability to be recognized by CD4 cells was determined essentially as described above. DC were pulsed overnight with pools of the peptides with each peptide at a final concentration of 10 microgram/ml. A large number of individual CD4 T cell lines (65/480) demonstrated significant proliferation and cytokine release (IFN-gamma) in response to the P703P peptide pools but not to a control peptide pool. The CD4 T cell lines which demonstrated specific activity were restimulated on the appropriate pool of P703P peptides and reassayed on the individual peptides of each pool as well as a peptide dose titration of the pool of peptides in a IFN-gamma release assay and in a proliferation assay.

[1028] Sixteen immunogenic peptides were recognized by the T cells from the entire set of peptide antigens tested. The amino acid sequences of these peptides are provided in SEQ ID NO: 799-814, with the corresponding cDNA sequences being provided in SEQ ID NO: 783-798, respectively. In some cases the peptide reactivity of the T cell line could be mapped to a single peptide, however some could be mapped to more than one peptide in each pool. Those CD4 T cell lines that displayed a representative pattern of recognition from each peptide pool with a reasonable affinity for peptide were chosen for further analysis (I-1A, -6A; II-4C, -5E; III-6E, IV-4B, -3F, -9B, -10F, V-5B, -4D, and -10F). These CD4 T cells lines were restimulated on the appropriate individual peptide and reassayed on autologous DC pulsed with a truncated form of recombinant P703P protein made in E. coli (a.a. 96-254 of SEQ ID NO: 525), full-length P703P made in the baculovirus expression system, and a fusion between influenza virus NS 1 and P703P made in E. coli. Of the T cell lines tested, line I-1 A recognized specifically the truncated form of P703P (E. coli) but no other recombinant form of P703P. This line also recognized the peptide used to elicit the T cells. Line 2-4C recognized the truncated form of P703P (E. coli) and the full length form of P703P made in baculovirus, as well as peptide. The remaining T cell lines tested were either peptide-specific only (II-5E, II-6F, IV-4B, IV-3F, IV-9B, IV-10F, V-5B and V-4D) or were non-responsive to any antigen tested (V-10F). These results demonstrate that the peptide sequence RPLLANDLMLIKLDE (SEQ ID NO: 814; corresponding to a.a. 110-124 of SEQ ID NO: 525) recognized by the T cell line I-1A, and the peptide sequences SVSESDTIRSISIAS (SEQ ID NO: 811; corresponding to a.a. 125-139 of SEQ ID NO: 525) and ISIASQCPTAGNSCL (SEQ ID NO: 810; corresponding to a.a. 135-149 of SEQ ID NO: 525) recognized by the T cell line II-4C may be naturally processed epitopes of the P703P protein.

[1029] In further studies, forty 15-mer peptides overlapping by 10 amino acids and derived spanning amino acids 47 to 254 of P703P (SEQ ID NO: 525) were generated by standard procedures and their ability to be recognized by CD4 cells was determined essentially as described above. DC were prepared from PBMC of a donor having distinct HLA DR and DQ alleles from that used in previous experiments. DC were pulsed overnight with pools of the peptides with each peptide at a final concentration of 0.25 microgram/ml, and each pool containing 10 peptides. Twelve lines were identified that demonstrated specific proliferation and cytokine production (measured in gamma-interferon ELISA assays) in response to the stimulating peptide pool. These lines were further tested for specific recognition of the peptide pool, specific recognition of individual peptides in the pool, and specific recognition of recombinant P703P protein. Lines 3A5H and 3A9H specifically proliferated and produced gamma-interferon in response to recombinant protein and one individual peptide as well as the peptide pool. Following re-stimulation on targets loaded with the specific peptide, only 3A9H responded specifically to targets exposed to lysates of fibroblasts infected adenovirus expressing full-length P703P. These results indicates that the line 3A9H can respond to antigenic peptide derived from protein synthesized in mammalian cells. The peptide to which the specific CD4 line responded correspond to amino acids 155-170 of P703P (SEQ ID NO: 943). The DNA sequence for this peptide is provided in SEQ ID NO: 942.

### Example 11

### Expression of a Breast Tumor-Derived Antigen in Prostate

[1030] Isolation of the antigen B305D from breast tumor by differential display is described in U.S. patent application Ser. No. 08/700,014, filed Aug. 20, 1996. Several different splice forms of this antigen were isolated. The determined cDNA sequences for these splice forms are provided in SEQ ID NO: 366-375, with the predicted amino acid sequences corresponding to the sequences of SEQ ID NO: 292, 298 and 301-303 being provided in SEQ ID NO: 299-306, respectively. In further studies, a splice variant of the cDNA sequence of SEQ ID NO: 366 was isolated which was found to contain an additional guanine residue at position 884 (SEQ ID NO: 530), leading to a frameshift in the open reading frame. The determined DNA sequence of this ORF is provided in SEQ ID NO: 531. This frameshift generates a protein sequence (provided in SEQ ID NO: 532) of 293 amino acids that contains the C-terminal domain common to the other isoforms of B305D but that differs in the N-terminal region.

[1031] The expression levels of B305D in a variety of tumor and normal tissues were examined by real time PCR and by Northern analysis. The results indicated that B305D is highly expressed in breast tumor, prostate tumor, normal prostate and normal testes, with expression being low or undetectable in all other tissues examined (colon tumor, lung tumor, ovary tumor, and normal bone marrow, colon, kidney, liver, lung, ovary, skin, small intestine, stomach). Using real-time PCR on a panel of prostate tumors, expression of B305D in prostate tumors was shown to increase with increasing Gleason grade, demonstrating that expression of B305D increases as prostate cancer progresses.

### Example 12

### Generation of Human CTL in Vitro Using Whole Gene Priming and Stimulation Techniques with the Prostate-Specific Antigen P501S

[1032] Using in vitro whole-gene priming with P501S-vaccinia infected DC (see, for example, Yee et al, The Journal of Immunology, 157(9):4079-86, 1996), human CTL lines were derived that specifically recognize autologous fibroblasts transduced with P501S (also known as L1-12), as determined by interferon-y ELISPOT analysis as described above. Using a panel of HLA-mismatched B-LCL lines transduced with P501S, these CTL lines were shown to be likely restricted to HLAB class I allele. Specifically, dendritic cells (DC) were differentiated from monocyte cultures derived from PBMC of normal human donors by growing for five days in RPMI medium containing 10% human serum, 50 ng/ml human GM-CSF and 30 ng/ml human IL-4. Following culture, DC were infected overnight with recombinant P501S vaccinia virus at a multiplicity of infection (M.O.I) of five, and matured overnight by the addition of 3 μg/ml CD40 ligand. Virus was inactivated by UV irradiation. CD8⁺ T cells were isolated using a magnetic bead system, and priming cultures were initiated using standard culture techniques. Cultures were restimulated every 7-10 days using autologous primary fibroblasts retrovirally transduced with P501S and CD80. Following four stimulation cycles, CD8⁺ T cell lines were identified that specifically produced interferon-y when stimulated with P501S and CD80-transduced autologous fibroblasts. A panel of HLA-mismatched B-LCL lines transduced with P501S were generated to define the restriction allele of the response. By measuring interferon-γ in an ELISPOT assay, the P501S specific response was shown to be likely restricted by HLA B alleles. These results demonstrate that a CD8⁺ CTL response to P501S can be elicited.

[1033] To identify the epitope(s) recognized, cDNA encoding P501S was fragmented by various restriction digests, and sub-cloned into the retroviral expression vector pBIB-KS. Retroviral supernatants were generated by transfection of the helper packaging line Phoenix-Ampho. Supernatants were then used to transduce Jurkat/A2Kb cells for CTL screening. CTL were screened in IFN-gamma ELISPOT assays against these A2Kb targets transduced with the “library” of P501S fragments. Initial positive fragments P501S/H3 and P501S/F2 were sequenced and found to encode amino acids 106-553 and amino acids 136-547, respectively, of SEQ ID NO: 113. A truncation of H3 was made to encode amino acid residues 106-351 of SEQ ID NO: 113, which was unable to stimulate the CTL, thus localizing the epitope to amino acid residues 351-547. Additional fragments encoding amino acids 1-472 (Fragment A) and amino acids 1-351 (Fragment B) were also constructed. Fragment A but not Fragment B stimulated the CTL thus localizing the epitope to amino acid residues 351-472. Overlapping 20-mer and 18-mer peptides representing this region were tested by pulsing Jurkat/A2Kb cells versus CTL in an IFN-gamma assay. Only peptides P501S-369(20) and P501S-369(18) stimulated the CTL. Nine-mer and 10-mer peptides representing this region were synthesized and similarly tested. Peptide P501S-370 (SEQ ID NO: 539) was the minimal 9-mer giving a strong response. Peptide P501S-376 (SEQ ID NO: 540) also gave a weak response, suggesting that it might represent a cross-reactive epitope.

[1034] In subsequent studies, the ability of primary human B cells transduced with P501S to prime MHC class I-restricted, P501S-specific, autologous CD8 T cells was examined. Primary B cells were derived from PBMC of a homozygous HLA-A2 donor by culture in CD40 ligand and IL-4, transduced at high frequency with recombinant P501S in the vector pBIB, and selected with blastocidin-S. For in vitro priming, purified CD8⁺ T cells were cultured with autologous CD40 ligand+IL-4 derived, P501S-transduced B cells in a 96-well microculture format. These CTL microcultures were re-stimulated with P501S-transduced B cells and then assayed for specificity. Following this initial screen, microcultures with significant signal above background were cloned on autologous EBV-transformed B cells (BLCL), also transduced with P501S. Using IFN-gamma ELISPOT for detection, several of these CD8 T cell clones were found to be specific for P501S, as demonstrated by reactivity to BLCL/P501S but not BLCL transduced with control antigen. It was further demonstrated that the anti-P501S CD8 T cell specificity is HLA-A2-restricted. First, antibody blocking experiments with anti-HLA-A,B,C monoclonal antibody (W6.32), anti-HLA-B,C monoclonal antibody (B1.23.2) and a control monoclonal antibody showed that only the anti-HLA-A,B,C antibody blocked recognition of P501S-expressing autologous BLCL. Secondly, the anti-P501S CTL also recognized an HLA-A2 matched, heterologous BLCL transduced with P501S, but not the corresponding EGFP transduced control BLCL.

[1035] A naturally processed, CD8, class I-restricted peptide epitope of P501S was identified as follows. Dendritic Cells (DC) were isolated by Percol gradient followed by differential adherence, and cultured for 5 days in the presence of RPMI medium containing 1% human serum, 50ng/ml GM-CSF and 30ng/ml IL-4. Following culture, DC were infected for 24 hours with P501S-expressing adenovirus at an MOI of 10 and matured for an additional 24 hours by the addition of 2ug/ml CD40 ligand. CD8 cells were enriched for by the subtraction of CD4+, CD14+ and CD16+ populations from PBMC with magnetic beads. Priming cultures containing 10,000 P501S-expressing DC and 100,000 CD8+ T cells per well were set up in 96-well V-bottom plates with RPMI containing 10% human serum, 5 ng/ml IL-12 and 10 ng/ml IL-6. Cultures were stimulated every 7 days using autologous fibroblasts retrovirally transduced to express P501S and CD80, and were treated with IFN-gamma for 48-72 hours to upregulate MHC Class I expression. 10 u/ml IL-2 was added at the time of stimulation and on days 2 and 5 following stimulation. Following 4 stimulation cycles, one P501S-specific CD8+ T cell line (referred to as 2A2) was identified that produced IFN-gamma in response to IFN-gamma-treated P501S/CD80 expressing autologous fibroblasts, but not in response to IFN-gamma-treated P703P/CD80 expressing autologous fibroblasts in a y-IFN Elispot assay. Line 2A2 was cloned in 96-well plates with 0.5 cell/well or 2 cells/well in the presence of 75,000 PBMC/well, 10,000 B-LCL/well, 30 ng/ml OKT3 and 50 u/ml IL-2. Twelve clones were isolated that showed strong P501S specificity in response to transduced fibroblasts.

[1036] Fluorescence activated cell sorting (FACS) analysis was performed on P501S-specific clones using CD3−, CD4− and CD8−specific antibodies conjugated to PercP, FITC and PE respectively. Consistent with the use of CD8 enriched T cells in the priming cultures, P5401S-specific clones were determined to be CD3+, CD8+ and CD4−.

[1037] To identify the relevant P501S epitope recognized by P501S specific CTL, pools of 18-20 mer or 30-mer peptides that spanned the majority of the amino acid sequence of P501S were loaded onto autologous B-LCL and tested in Y-IFN Elispot assays for the ability to stimulate two P501S-specific CTL clones, referred to as 4E5 and 4E7. One pool, composed of five 18-20 mer peptides that spanned amino acids 411-486 of P501S (SEQ ID NO: 113), was found to be recognized by both P501S-specific clones. To identify the specific 18-20 mer peptide recognized by the clones, each of the 18-20 mer peptides that comprised the positive pool were tested individually in y-IFN Elispot assays for the ability to stimulate the two P501S-specific CTL clones, 4E5 and 4E7 Both 4E5 and 4E7 specifically recognized one 20-mer peptide (SEQ ID NO: 853; cDNA sequence provided in SEQ ID NO: 854) that spanned amino acids 453-472 of P501S. Since the minimal epitope recognized by CD8+ T cells is almost always either a 9 or 10-mer peptide sequence, 10-mer peptides that spanned the entire sequence of SEQ ID NO: 853 were synthesized that differed by 1 amino acid. Each of these 10-mer peptides was tested for the ability to stimulate two P501S-specific clones, (referred to as 1D5 and 1E12). One 10-mer peptide (SEQ ID NO: 855; cDNA sequence provided in SEQ ID NO: 856) was identified that specifically stimulated the P501S-specific clones. This epitope spans amino acids 463-472 of P501S. This sequence defines a minimal 10-mer epitope from P501S that can be naturally processed and to which CTL responses can be identified in normal PBMC. Thus, this epitope is a candidate for use as a vaccine moiety, and as a therapeutic and/or diagnostic reagent for prostate cancer.

[1038] To identify the class I restriction element for the P501S-derived sequence of SEQ ID NO: 855, HLA blocking and mismatch analyses were performed. In γ-IFN Elispot assays, the specific response of clones 4A7 and 4E5 to P501S-transduced autologous fibroblasts was blocked by pre-incubation with 25ug/ml W6/32 (pan-Class I blocking antibody) and Bi.23.2 (HLA-B/C blocking antibody). These results demonstrate that the SEQ ID NO: 855-specific response is restricted to an HLA-B or HLA-C allele.

[1039] For the HLA mismatch analysis, autologous B-LCL (HLA-A1,A2,B8,B51, Cw1, Cw7) and heterologous B-LCL (HLA-A2,A3,B18,B51,Cw5,Cw14) that share the HLAB51 allele were pulsed for one hour with 20 ug/ml of peptide of SEQ ID NO: 855, washed, and tested in γ-IFN Elispot assays for the ability to stimulate clones 4A7 and 4E5. Antibody blocking assays with the B1.23.2 (HLA-B/C blocking antibody) were also performed. SEQ ID NO: 855-specific response was detected using both the autologous (D326) and heterologous (D107) B-LCL, and furthermore the responses were blocked by pre-incubation with 25 ug/ml of B1.23.2 HLA-B/C blocking antibody. Together these results demonstrate that the P501S-specific response to the peptide of SEQ ID NO: 855 is restricted to the HLA-B51 class I allele. Molecular cloning and sequence analysis of the HLA-B51 allele from D3326 revealed that the HLA-B51 subtype of D326 is HLA-B51011.

[1040] Based on the 10-mer P501S-derived epitope of SEQ ID NO: 855, two 9-mers with the sequences of SEQ ID NO: 857 and 858 were synthesized and tested in Elispot assays for the ability to stimulate two P501S-specific CTL clones derived from line 2A2. The 10-mer peptide of SEQ ID NO: 855, as well as the 9-mer peptide of SEQ ID NO: 858, but not the 9-mer peptide of SEQ ID NO: 857, were capable of stimulating the P501S-specific CTL to produce IFN-gamma. These results demonstrate that the peptide of SEQ ID NO: 858 is a 9-mer P501S-derived epitope recognized by P501S-specific CTL. The DNA sequence encoding the epitope of SEQ ID NO: 858 is provided in SEQ ID NO: 859.

[1041] To identify the class I restricting allele for the P501S-derived peptide of SEQ ID NO: 855 and 858 specific response, each of the HLA B and C alleles were cloned from the donor used in the in vitro priming experiment. Sequence analysis indicated that the relevant alleles were HLA-B8, HLA-B51, HLA-Cw01 and HLA-Cw07. Each of these alleles were subcloned into an expression vector and co-transfected together with the P501S gene into VA-13 cells. Transfected VA-13 cells were then tested for the ability to specifically stimulate the P501S-specific CTL in ELISPOT assays. VA-13 cells transfected with P501S and HLA-B51 were capable of stimulating the P501S-specific CTL to secrete gamma-IFN. VA-13 cells transfected with HLA-B51 alone or P501S+ the other HLA-alleles were not capable of stimulating the P501S-specific CTL. These results demonstrate that the restricting allele for the P501S-specific response is the HLAB51 allele. Sequence analysis revealed that the subtype of the relevant restricting allele is HLA-B51011.

[1042] To determine if the P501S-specific CTL could recognize prostate tumor cells that express P501S, the P501S-positive lines LnCAP and CRL2422 (both expressing “moderate” amounts of P501S mRNA and protein), and PC-3 (expressing low amounts of P501S mRNA and protein), plus the P501S-negative cell line DU-145 were retrovirally transduced with the HLA-B51011 allele that was cloned from the donor used to generate the P501S-specific CTL. HLA-B51011- or EGFP-transduced and selected tumor cells were treated with gamma-interferon and androgen (to upregulate stimulatory functions and P501S, respectively) and used in gamma-interferon Elispot assays with the P501S-specific CTL clones 4E5 and 4E7. Untreated cells were used as a control.

[1043] Both 4E5 and 4E7 efficiently and specifically recognized LnCAP and CRL2422 cells that were transduced with the HLA-B51011 allele, but not the same cell lines transduced with EGFP. Additionally, both CTL clones specifically recognized PC-3 cells transduced with HLA-B51011, but not the P501S-negative tumor cell line DU-145. Treatment with gamma-interferon or androgen did not enhance the ability of CTL to recognize tumor cells. These results demonstrate that P501S-specific CTL, generated by in vitro whole gene priming, specifically and efficiently recognize prostate tumor cell lines that express P501S.

[1044] A naturally processed CD4 epitope of P501S was identified as follows.

[1045] CD4 cells specific for P501S were prepared as described above. A series of 16 overlapping peptides were synthesized that spanned approximately 50% of the amino terminal portion of the P501S gene (amino acids 1-325 of SEQ ID NO: 113). For priming, peptides were combined into pools of 4 peptides, pulsed at 4 μg/ml onto dendritic cells (DC) for 24 hours, with TNF-alpha. DC were then washed and mixed with negatively selected CD4+ T cells in 96 well U-bottom plates. Cultures were re-stimulated weekly on fresh DC loaded with peptide pools. Following a total of 4 stimulation cycles, cells were rested for an additional week and tested for specificity to APC pulsed with peptide pools using γ-IFN ELISA and proliferation assays. For these assays, adherent monocytes loaded with either the relevant peptide pool at 4 ug/ml or an irrelevant peptide at μg/ml were used as APC. T cell lines that demonstrated either specific cytokine secretion or proliferation were then tested for recognition of individual peptides that were present in the pool. T cell lines could be identified from pools A and B that recognized individual peptides from these pools.

[1046] From pool A, lines AD9 and AE10 specifically recognized peptide I (SEQ ID NO: 862), and line AF5 recognized peptide 39 (SEQ ID NO: 861). From pool B, line BC6 could be identified that recognized peptide 58 (SEQ ID NO: 860). Each of these lines were stimulated on the specific peptide and tested for specific recognition of the peptide in a titration assay as well as cell lysates generated by infection of HEK 293 cells with adenovirus expressing either P501S or an irrelevant antigen. For these assays, APC-adherent monocytes were pulsed with either 10, 1, or 0.1 μg/ml individual P501S peptides, and DC were pulsed overnight with a 1:5 dilution of adenovirally infected cell lysates. Lines AD9, AE10 and AF5 retained significant recognition of the relevant P501S-derived peptides even at 0.1 mg/ml. Furthermore, line AD9 demonstrated significant (8.1 fold stimulation index) specific activity for lysates from adenovirus-P501S infected cells. These results demonstrate that high affinity CD4 T cell lines can be generated toward P501S-derived epitopes, and that at least a subset of these T cells specific for the P501S derived sequence of SEQ ID NO: 862 are specific for an epitope that is naturally processed by human cells. The DNA sequences encoding the amino acid sequences of SEQ ID NO: 860-862 are provided in SEQ ID NO: 863-865, respectively.

[1047] To further characterize the P501S-specific activity of AD9, the line was cloned using anti-CD3. Three clones, referred to as 1A1, 1A9 and 1F5, were identified that were specific for the P501S-1 peptide (SEQ ID NO: 862). To determine the HLA restriction allele for the P501S-specific response, each of these clones was tested in class II antibody blocking and HLA mismatch assays using proliferation and gamma-interferon assays. In antibody blocking assays and measuring gamma-interferon production using ELISA assays, the ability of all three clones to recognize peptide pulsed APC was specifically blocked by co-incubation with either a pan-class II blocking antibody or a HLA-DR blocking antibody, but not with a HLA-DQ or an irrelevant antibody. Proliferation assays performed simultaneously with the same cells confirmed these results. These data indicate that the P501S-specific response of the clones is restricted by an HLA-DR allele. Further studies demonstrated that the restricting allele for the P501S-specific response is HLA-DRB1501.

### Example 13

### Identification of Prostate-Specific Antigens by Microarray Analysis

[1048] This Example describes the isolation of certain prostate-specific polypeptides from a prostate tumor cDNA library.

[1049] A human prostate tumor cDNA expression library as described above was screened using microarray analysis to identify clones that display at least a three fold over-expression in prostate tumor and/or normal prostate tissue, as compared to non-prostate normal tissues (not including testis). 372 clones were identified, and 319 were successfully sequenced. Table I presents a summary of these clones, which are shown in SEQ ID NOs:385-400. Of these sequences SEQ ID NOs:386, 389, 390 and 392 correspond to novel genes, and SEQ ID NOs: 393 and 396 correspond to previously identified sequences. The others (SEQ ID NOs:385, 387, 388, 391, 394, 395 and 397-400) correspond to known sequences, as shown in Table I.

TABLE I
Summary of Prostate Tumor Antigens

| Known Genes | Previously Identified Genes | Novel Genes |
|---|---|---|
| T-cell gamma chain | P504S | 23379 (SEQ ID NO: 389) |
| Kallikrein | P1000C | 23399 (SEQ ID NO: 392) |
| Vector | P501S | 23320 (SEQ ID NO: 386) |
| CGI-82 protein mRNA | P503S | 23381 (SEQ ID NO: 390) |
| (23319; SEQ ID NO: 385) | | |
| PSA | P510S | |
| Ald. 6 Dehyd. | P784P | |
| L-iditol-2 dehydrogenase | P502S | |
| (23376; SEQ ID NO: 388) | | |
| Ets transcription factor PDEF | P706P | |
| (22672; SEQ ID NO: 398) | | |
| hTGR | 19142.2, bangur.seq | |
| (22678; SEQ ID NO:399) | (22621; SEQ ID NO: 396) | |
| KIAA0295 | 5566.1 Wang | |
| (22685; SEQ ID NO: 400) | (23404; SEQ ID NO: 393) | |
| Prostatic Acid Phosphatase | P712P | |
| (22655; SEQ ID NO: 397) | | |
| transglutaminase | P778P | |
| (22611; SEQ ID NO: 395) | | |
| HDLBP | | |
| (23508; SEQ ID NO: 394) | | |
| CGI-69 Protein | | |
| (23367; SEQ ID NO: 387) | | |
| KIAA0122 | | |
| (23383; SEQ ID NO: 391) | | |
| TEEG | | |

[1050] CGI-82 showed 4.06 fold over-expression in prostate tissues as compared to other normal tissues tested. It was over-expressed in 43% of prostate tumors, 25% normal prostate, not detected in other normal tissues tested. L-iditol-2 dehydrogenase showed 4.94 fold over-expression in prostate tissues as compared to other normal tissues tested. It was over-expressed in 90% of prostate tumors, 100% of normal prostate, and not detected in other normal tissues tested. Ets transcription factor PDEF showed 5.55 fold over-expression in prostate tissues as compared to other normal tissues tested. It was over-expressed in 47% prostate tumors, 25% normal prostate and not detected in other normal tissues tested. hTGR1 showed 9.11 fold over-expression in prostate tissues as compared to other normal tissues tested. It was over-expressed in 63% of prostate tumors and is not detected in normal tissues tested including normal prostate. KIAA0295 showed 5.59 fold over-expression in prostate tissues as compared to other normal tissues tested. It was over-expressed in 47% of prostate tumors, low to undetectable in normal tissues tested including normal prostate tissues. Prostatic acid phosphatase showed 9.14 fold over-expression in prostate tissues as compared to other normal tissues tested. It was over-expressed in 67% of prostate tumors, 50% of normal prostate, and not detected in other normal tissues tested. Transglutaminase showed 14.84 fold over-expression in prostate tissues as compared to other normal tissues tested. It was over-expressed in 30% of prostate tumors, 50% of normal prostate, and is not detected in other normal tissues tested. High density lipoprotein binding protein (HDLBP) showed 28.06 fold over-expression in prostate tissues as compared to other normal tissues tested. It was over-expressed in 97% of prostate tumors, 75% of normal prostate, and is undetectable in all other normal tissues tested. CGI-69 showed 3.56 fold over-expression in prostate tissues as compared to other normal tissues tested. It is a low abundant gene, detected in more than 90% of prostate tumors, and in 75% normal prostate tissues. The expression of this gene in normal tissues was very low. KIAA0122 showed 4.24 fold over-expression in prostate tissues as compared to other normal tissues tested. It was over-expressed in 57% of prostate tumors, it was undetectable in all normal tissues tested including normal prostate tissues. 19142.2 bangur showed 23.25 fold over-expression in prostate tissues as compared to other normal tissues tested. It was over-expressed in 97% of prostate tumors and 100% of normal prostate. It was undetectable in other normal tissues tested. 5566.1 Wang showed 3.31 fold over-expression in prostate tissues as compared to other normal tissues tested. It was over-expressed in 97% of prostate tumors, 75% normal prostate and was also over-expressed in normal bone marrow, pancreas, and activated PBMC. Novel clone 23379 (also referred to as P553S) showed 4.86 fold over-expression in prostate tissues as compared to other normal tissues tested. It was detectable in 97% of prostate tumors and 75% normal prostate and is undetectable in all other normal tissues tested. Novel clone 23399 showed 4.09 fold over-expression in prostate tissues as compared to other normal tissues tested. It was over-expressed in 27% of prostate tumors and was undetectable in all normal tissues tested including normal prostate tissues. Novel clone 23320 showed 3.15 fold over-expression in prostate tissues as compared to other normal tissues tested. It was detectable in all prostate tumors and 50% of normal prostate tissues. It was also expressed in normal colon and trachea. Other normal tissues do not express this gene at high level.

[1051] Subsequent full-length cloning studies on P553S, using standard techniques, revealed that this clone is an incomplete spliced form of P501S. The determined cDNA sequences for four splice variants of P553S are provided in SEQ ID NO: 702-705. An amino acid sequence encoded by SEQ ID NO: 705 is provided in SEQ ID NO: 706. The cDNA sequence of SEQ ID NO: 702 was found to contain two open reading frames (ORFs). The amino acid sequences encoded by these two ORFs are provided in SEQ ID NO: 707 and 708.

### Example 14

### Identification of Prostate-Specific Antigens by Electronic Subtraction

[1052] This Example describes the use of an electronic subtraction technique to identify prostate-specific antigens.

[1053] Potential prostate-specific genes present in the GenBank human EST database were identified by electronic subtraction (similar to that described by Vasmatizis et al., Proc. Natl. Acad. Sci. USA 95:300-304, 1998). The sequences of EST clones (43,482) derived from various prostate libraries were obtained from the GenBank public human EST database. Each prostate EST sequence was used as a query sequence in a BLASTN (National Center for Biotechnology Information) search against the human EST database. All matches considered identical (length of matching sequence >100 base pairs, density of identical matches over this region >70%) were grouped (aligned) together in a cluster. Clusters containing more than 200 ESTs were discarded since they probably represented repetitive elements or highly expressed genes such as those for ribosomal proteins. If two or more clusters shared common ESTs, those clusters were grouped together into a “supercluster,” resulting in 4,345 prostate superclusters.

[1054] Records for the 479 human cDNA libraries represented in the GenBank release were downloaded to create a database of these cDNA library records. These 479 cDNA libraries were grouped into three groups: Plus (normal prostate and prostate tumor libraries, and breast cell line libraries, in which expression was desired), Minus (libraries from other normal adult tissues, in which expression was not desirable), and Other (libraries from fetal tissue, infant tissue, tissues found only in women, non-prostate tumors and cell lines other than prostate cell lines, in which expression was considered to be irrelevant). A summary of these library groups is presented in Table II.

TABLE II
Prostate cDNA Libraries and ESTs

| Library | # of Libraries | # of ESTs |
|---|---|---|
| Plus | 25 | 43,482 |
| Normal | 11 | 18,875 |
| Tumor | 11 | 21,769 |
| Cell lines | 3 | 2,838 |
| Minus | 166 | |
| Other | 287 | |

[1055] Each supercluster was analyzed in terms of the ESTs within the supercluster. The tissue source of each EST clone was noted and used to classify the superclusters into four groups: Type 1—EST clones found in the Plus group libraries only; no expression detected in Minus or Other group libraries; Type 2—EST clones derived from the Plus and Other group libraries only; no expression detected in the Minus group; Type 3—EST clones derived from the Plus, Minus and Other group libraries, but the number of ESTs derived from the Plus group is higher than in either the Minus or Other groups; and Type 4—EST clones derived from Plus, Minus and Other group libraries, but the number derived from the Plus group is higher than the number derived from the Minus group. This analysis identified 4,345 breast clusters (see Table III). From these clusters, 3,172 EST clones were ordered from Research Genetics, Inc., and were received as frozen glycerol stocks in 96-well plates.

TABLE III
Prostate Cluster Summary

| | # of | # of ESTs |
|---|---|---|
| Type | Superclusters | Ordered |
| 1 | 688 | 677 |
| 2 | 2899 | 2484 |
| 3 | 85 | 11 |
| 4 | 673 | 0 |
| Total | 4345 | 3172 |

[1056] The EST clone inserts were PCR-amplified using amino-linked PCR primers for Synteni microarray analysis. When more than one PCR product was obtained for a particular clone, that PCR product was not used for expression analysis. In total, 2,528 clones from the electronic subtraction method were analyzed by microarray analysis to identify electronic subtraction breast clones that had high levels of tumor vs. normal tissue mRNA. Such screens were performed using a Synteni (Palo Alto, Calif.) microarray, according to the manufacturer's instructions (and essentially as described by Schena et al., Proc. Natl. Acad. Sci. USA 93:10614-10619, 1996 and Heller et al., Proc. Natl. Acad. Sci. USA 94:2150-2155, 1997). Within these analyses, the clones were arrayed on the chip, which was then probed with fluorescent probes generated from normal and tumor prostate cDNA, as well as various other normal tissues. The slides were scanned and the fluorescence intensity was measured.

[1057] Clones with an expression ratio greater than 3 (i.e., the level in prostate tumor and normal prostate mRNA was at least three times the level in other normal tissue mRNA) were identified as prostate tumor-specific sequences (Table IV). The sequences of these clones are provided in SEQ ID NO: 401-453, with certain novel sequences shown in SEQ ID NO: 407, 413, 416-419, 422, 426, 427 and 450.

TABLE IV
Prostate-tumor Specific Clones

| | Sequence | |
|---|---|---|
| SEQ ID NO. | Designation | Comments |
| 401 | 22545 | previously identified P1000C |
| 402 | 22547 | previously identified P704P |
| 403 | 22548 | known |
| 404 | 22550 | known |
| 405 | 22551 | PSA |
| 406 | 22552 | prostate secretory protein 94 |
| 407 | 22553 | novel |
| 408 | 22558 | previously identified P509S |
| 409 | 22562 | glandular kallikrein |
| 410 | 22565 | previously identified P1000C |
| 411 | 22567 | PAP |
| 412 | 22568 | B1006C (breast tumor antigen) |
| 413 | 22570 | novel |
| 414 | 22571 | PSA |
| 415 | 22572 | previously identified P706P |
| 416 | 22573 | novel |
| 417 | 22574 | novel |
| 418 | 22575 | novel |
| 419 | 22580 | novel |
| 420 | 22581 | PAP |
| 421 | 22582 | prostatic secretory protein 94 |
| 422 | 22583 | novel |
| 423 | 22584 | prostatic secretory protein 94 |
| 424 | 22585 | prostatic secretory protein 94 |
| 425 | 22586 | known |
| 426 | 22587 | novel |
| 427 | 22588 | novel |
| 428 | 22589 | PAP |
| 429 | 22590 | known |
| 430 | 22591 | PSA |
| 431 | 22592 | known |
| 432 | 22593 | Previously identified P777P |
| 433 | 22594 | T cell receptor gamma chain |
| 434 | 22595 | Previously identified P705P |
| 435 | 22596 | Previously identified P707P |
| 436 | 22847 | PAP |
| 437 | 22848 | known |
| 438 | 22849 | prostatic secretory protein 57 |
| 439 | 22851 | PAP |
| 440 | 22852 | PAP |
| 441 | 22853 | PAP |
| 442 | 22854 | previously identified P509S |
| 443 | 22855 | previously identified P705P |
| 444 | 22856 | previously identified P774P |
| 445 | 22857 | PSA |
| 446 | 23601 | previously identified P777P |
| 447 | 23602 | PSA |
| 448 | 23605 | PSA |
| 449 | 23606 | PSA |
| 450 | 23612 | novel |
| 451 | 23614 | PSA |
| 452 | 23618 | previously identified P1000C |
| 453 | 23622 | previously identified P705P |

[1058] Further studies on the clone of SEQ ID NO: 407 (also referred to as P1020C) led to the isolation of an extended cDNA sequence provided in SEQ ID NO: 591. This extended cDNA sequence was found to contain an open reading frame that encodes the predicted amino acid sequence of SEQ ID NO: 592. The P1020C cDNA and amino acid sequences were found to show some similarity to the human endogenous retroviral HERV-K pol gene and protein.

### Example 15

### Further Identification of Prostate-Specific Antigens by Microarray Analysis

[1059] This Example describes the isolation of additional prostate-specific polypeptides from a prostate tumor cDNA library.

[1060] A human prostate tumor cDNA expression library as described above was screened using microarray analysis to identify clones that display at least a three fold over-expression in prostate tumor and/or normal prostate tissue, as compared to non-prostate normal tissues (not including testis). 142 clones were identified and sequenced. Certain of these clones are shown in SEQ ID NO: 454-467. Of these sequences, SEQ ID NO: 459-460 represent novel genes. The others (SEQ ID NO: 454-458 and 461-467) correspond to known sequences. Comparison of the determined cDNA sequence of SEQ ID NO: 461 with sequences in the Genbank database using the BLAST program revealed homology to the previously identified transmembrane protease serine 2 (TMPRSS2). The full-length cDNA sequence for this clone is provided in SEQ ID NO: 894, with the corresponding amino acid sequence being provided in SEQ ID NO: 895. The cDNA sequence encoding the first 209 amino acids of TMPRSS2 is provided in SEQ ID NO: 896, with the first 209 amino acids being provided in SEQ ID NO: 897.

[1061] The sequence of SEQ ID NO: 462 (referred to as P835P) was found to correspond to the previously identified clone FLJ13518 (Accession AK023643; SEQ ID NO: 917), which had no associated open reading frame (ORF). This clone was used to search the Geneseq DNA database and matched a clone previously identified as a G protein-coupled receptor protein (DNA Geneseq Accession A093 51; amino acid Geneseq Accession Y92365), that is characterized by the presence of seven transmembrane domains. The sequences of fragments between these domains are provided in SEQ ID NO: 921-928, with SEQ ID NO: 921, 923, 925 and 927 representing extracellular domains and SEQ ID NO: 922, 924, 926 and 928 representing intracellular domains. SEQ ID NO: 921-928 represent amino acids 1-28, 53-61, 83-103, 124-143, 165-201, 226-238, 263-272 and 297-381, respectively, of P835P. The full-length cDNA sequence for P835P is provided in SEQ ID NO: 916. The cDNA sequence of the open reading frame for P835P, including stop codon, is provided in SEQ ID NO: 918, with the open reading frame without stop codon being provided in SEQ ID NO: 919 and the corresponding amino acid sequence being provided in SEQ ID NO: 920.

### Example 16

### Further Characterization of Prostate-Specific Antigen P710P

[1062] This Example describes the full length cloning of P710P.

[1063] The prostate cDNA library described above was screened with the P710P fragment described above. One million colonies were plated on LB/Ampicillin plates. Nylon membrane filters were used to lift these colonies, and the cDNAs picked up by these filters were then denatured and cross-linked to the filters by UV light. The P710P fragment was radiolabeled and used to hybridize with the filters. Positive cDNA clones were selected and their cDNAs recovered and sequenced by an automatic Perkin Elmer/Applied Biosystems Division Sequencer. Four sequences were obtained, and are presented in SEQ ID NO: 468-471. These sequences appear to represent different splice variants of the P710P gene. Subsequent comparison of the cDNA sequences of P710P with those in Genbank releaved homology to the DD3 gene (Genbank accession numbers AF103907 & AF103908). The cDNA sequence of DD3 is provided in SEQ ID NO: 690.

### Example 17

### Protein Expression of Prostate-Specific Antigens

[1064] This example describes the expression and purification of prostate-specific antigens in E. coli, baculovirus and mammalian cells.

[1065] a) Expression of P501S in E. coli

[1066] Expression of the full-length form of P501S was attempted by first cloning P501S without the leader sequence (amino acids 36-553 of SEQ ID NO: 113) downstream of the first 30 amino acids of the M. tuberculosis antigen Ra12 (SEQ ID NO: 484) in pET17b. Specifically, P501S DNA was used to perform PCR using the primers AW025 (SEQ ID NO: 485) and AW003 (SEQ ID NO: 486). AW025 is a sense cloning primer that contains a HindIII site. AW003 is an antisense cloning primer that contains an EcoRI site. DNA amplification was performed using 5 μl 10X Pfu buffer, 1 μl 20 mM dNTPs, 1 μl each of the PCR primers at 10 μM concentration, 40 μl water, 1 pl Pfu DNA polymerase (Stratagene, La Jolla, Calif.) and 1 μl DNA at 100 ng/μl. Denaturation at 95° C. was performed for 30 sec, followed by 10 cycles of 95° C. for 30 sec, 60° C. for 1 min and by 72° C. for 3 min. 20 cycles of 95° C. for 30 sec, 65° C. for 1 min and by 72° C. for 3 min, and lastly by 1 cycle of 72° C. for 10 min. The PCR product was cloned to Ra12m/pET17b using HindIII and EcoRI. The sequence of the resulting fusion construct (referred to as Ra12-P501S-F) was confirmed by DNA sequencing.

[1067] The fusion construct was transformed into BL21(DE3)pLysE, pLysS and CodonPlus E. coli (Stratagene) and grown overnight in LB broth with kanamycin. The resulting culture was induced with IPTG. Protein was transferred to PVDF membrane and blocked with 5% non-fat milk (in PBS-Tween buffer), washed three times and incubated with mouse anti-His tag antibody (Clontech) for 1 hour. The membrane was washed 3 times and probed with HRP-Protein A (Zymed) for 30 min. Finally, the membrane was washed 3 times and developed with ECL (Amersham). No expression was detected by Western blot. Similarly, no expression was detected by Western blot when the Ra12-P501S-F fusion was used for expression in BL21CodonPlus by CE6 phage (Invitrogen).

[1068] An N-terminal fragment of P501S (amino acids 36-325 of SEQ ID NO: 113) was cloned down-stream of the first 30 amino acids of the M. tuberculosis antigen Ra12 in pET17b as follows. P501S DNA was used to perform PCR using the primers AW025 (SEQ ID NO: 485) and AW027 (SEQ ID NO: 487). AW027 is an antisense cloning primer that contains an EcoRI site and a stop codon. DNA amplification was performed essentially as described above. The resulting PCR product was cloned to Ra12 in pET17b at the HindIII and EcoRI sites. The fusion construct (referred to as Ra12-P501S-N) was confirmed by DNA sequencing.

[1069] The Ra12-P501S-N fusion construct was used for expression in BL21(DE3)pLysE, pLysS and CodonPlus, essentially as described above. Using Western blot analysis, protein bands were observed at the expected molecular weight of 36 kDa. Some high molecular weight bands were also observed, probably due to aggregation of the recombinant protein. No expression was detected by Western blot when the Ra12-P501S-F fusion was used for expression in BL21 CodonPlus by CE6 phage.

[1070] A fusion construct comprising a C-terminal portion of P501S (amino acids 257-553 of SEQ ID NO: 113) located down-stream of the first 30 amino acids of the M. tuberculosis antigen Ra12 (SEQ ID NO: 484) was prepared as follows. P501S DNA was used to perform PCR using the primers AW026 (SEQ ID NO: 488) and AW003 (SEQ ID NO: 486). AW026 is a sense cloning primer that contains a HindIII site. DNA amplification was performed essentially as described above. The resulting PCR product was cloned to Ra12 in pET17b at the HindIII and EcoRI sites. The sequence for the fusion construct (referred to as Ra12-P501S-C) was confirmed.

[1071] The Ra12-P501S-C fusion construct was used for expression in BL21(DE3)pLysE, pLysS and CodonPlus, as described above. A small amount of protein was detected by Western blot, with some molecular weight aggregates also being observed. Expression was also detected by Western blot when the Ra12-P501S-C fusion was used for expression in BL21CodonPlus induced by CE6 phage.

[1072] A fusion construct comprising a fragment of P501S (amino acids 36-298 of SEQ ID NO: 113) located down-stream of the M. tuberculosis antigen Ra12 (SEQ ID NO: 848) was prepared as follows. P501S DNA was used to perform PCR using the primers AW042 (SEQ ID NO: 849) and AW053 (SEQ ID NO: 850). AW042 is a sense cloning primer that contains a EcoRI site. AW053 is an antisense primer with stop and Xho I sites. DNA amplification was performed essentially as described above. The resulting PCR product was cloned to Ra12 in pET17b at the EcoRI and Xho I sites. The resulting fusion construct (referred to as Ra12-P501S-E2) was expressed in B834 (DE3) pLys S E. coli host cells in TB media for 2 h at room temperature. Expressed protein was purified by washing the inclusion bodies and running on a Ni-NTA column. The purified protein stayed soluble in buffer containing 20 mM Tris-HCl (pH 8), 100 mM NaCl, 10 mM β-Me and 5% glycerol. The determined cDNA and amino acid sequences for the expressed fusion protein are provided in SEQ ID NO: 851 and 852, respectfully.

[1073] b) Expression of P501S in Baculovirus

[1074] The Bac-to-Bac baculovirus expression system (BRL Life Technologies, Inc.) was used to express P501S protein in insect cells. Full-length P501S (SEQ ID NO: 113) was amplified by PCR and cloned into the XbaI site of the donor plasmid pFastBacI. The recombinant bacmid and baculovirus were prepared according to the manufacturer's instructions. The recombinant baculovirus was amplified in Sf9 cells and the high titer viral stocks were utilized to infect High Five cells (Invitrogen) to make the recombinant protein. The identity of the full-length protein was confirmed by N-terminal sequencing of the recombinant protein and by Western blot analysis (FIG. 7). Specifically, 0.6 million High Five cells in 6-well plates were infected with either the unrelated control virus BV/ECD_PD (lane 2), with recombinant baculovirus for P501S at different amounts or MOIs (lanes 4-8), or were uninfected (lane 3). Cell lysates were run on SDS-PAGE under reducing conditions and analyzed by Western blot with the anti-P501S monoclonal antibody P501S-10E3-G4D3 (prepared as described below). Lane 1 is the biotinylated protein molecular weight marker (BioLabs).

[1075] The localization of recombinant P501S in the insect cells was investigated as follows. The insect cells overexpressing P501S were fractionated into fractions of nucleus, mitochondria, membrane and cytosol. Equal amounts of protein from each fraction were analyzed by Western blot with a monoclonal antibody against P501S. Due to the scheme of fractionation, both nucleus and mitochondria fractions contain some plasma membrane components. However, the membrane fraction is basically free from mitochondria and nucleus. P501S was found to be present in all fractions that contain the membrane component, suggesting that P501S may be associated with plasma membrane of the insect cells expressing the recombinant protein.

[1076] c) Expression of P501S in Mammalian Cells

[1077] Full-length P501S (553 amino acids; SEQ ID NO: 113) was cloned into various mammalian expression vectors, including pCEP4 (Invitrogen), pVR1012 (Vical, San Diego, Calif.) and a modified form of the retroviral vector pBMN, referred to as pBIB. Transfection of P501S/pCEP4 and P501S/pVR1012 into HEK293 fibroblasts was carried out using the Fugene transfection reagent (Boehringer Mannheim). Briefly, 2 ul of Fugene reagent was diluted into 100 ul of serum-free media and incubated at room temperature for 5-10 min. This mixture was added to 1 ug of P501S plasmid DNA, mixed briefly and incubated for 30 minutes at room temperature. The Fugene/DNA mixture was added to cells and incubated for 24-48 hours. Expression of recombinant P501S in transfected HEK293 fibroblasts was detected by means of Western blot employing a monoclonal antibody to P501S.

[1078] Transfection of p501S/pCEP4 into CHO-K cells (American Type Culture Collection, Rockville, MD) was carried out using GenePorter transfection reagent (Gene Therapy Systems, San Diego, Calif.). Briefly, 15 μl of GenePorter was diluted in 500 μl of serum-free media and incubated at room temperature for 10 min. The GenePorter/media mixture was added to 2 μg of plasmid DNA that was diluted in 500 μl of serum-free media, mixed briefly and incubated for 30 min at room temperature. CHO-K cells were rinsed in PBS to remove serum proteins, and the GenePorter/DNA mix was added and incubated for 5 hours. The transfected cells were then fed an equal volume of 2× media and incubated for 24-48 hours.

[1079] FACS analysis of P501S transiently infected CHO-K cells, demonstrated surface expression of P501S. Expression was detected using rabbit polyclonal antisera raised against a P501S peptide, as described below. Flow cytometric analysis was performed using a FaCScan (Becton Dickinson), and the data were analyzed using the Cell Quest program.

[1080] d) Expression of P703P in Baculovirus

[1081] The cDNA for full-length P703P-DE5 (SEQ ID NO: 326), together with several flanking restriction sites, was obtained by digesting the plasmid pcDNA703 with restriction endonucleases Xba I and Hind III. The resulting restriction fragment (approx. 800 base pairs) was ligated into the transfer plasmid pFastBacI which was digested with the same restriction enzymes. The sequence of the insert was confirmed by DNA sequencing. The recombinant transfer plasmid pFBP703 was used to make recombinant bacmid DNA and baculovirus using the Bac-To-Bac Baculovirus expression system (BRL Life Technologies). High Five cells were infected with the recombinant virus BVP703, as described above, to obtain recombinant P703P protein.

[1082] e) Expression of P788P in E. Coli

[1083] A truncated, N-terminal portion, of P788P (residues 1-644 of SEQ ID NO: 777; referred to as P788P-N) fused with a C-terminal 6× His Tag was expressed in E. coli as follows. P788P cDNA was amplified using the primers AW080 and AW081 (SEQ ID NO: 815 and 816). AW080 is a sense cloning primer with an NdeI site. AW081 is an antisense cloning primer with a XhoI site. The PCR-amplified P788P, as well as the vector pCRX1, were digested with NdeI and XhoI. Vector and insert were ligated and transformed into NovaBlue cells. Colonies were randomly screened for insert and then sequenced. P788P-N clone #6 was confirmed to be identical to the designed construct. The expression construct P788P-N #6/pCRX1 was transformed into E. coli BL21 CodonPlus-RIL competent cells. After induction, most of the cells grew well, achieving OD600 of greater than 2.0 after 3 hr. Coomassie stained SDS-PAGE showed an over-expressed band at about 75 kD. Western blot analysis using a 6× HisTag antibody confirmed the band was P788P-N. The determined cDNA sequence for P788P-N is provided in SEQ ID NO: 817, with the corresponding amino acid sequence being provided in SEQ ID NO: 818.

[1084] f) Expression of P510S in E. coli

[1085] The P510S protein has 9 potential transmembrane domains and is predicted to be located at the plasma membrane. The C-terminal protein of this protein, as well as the predicted third extracellular domain of P510S were expressed in E. coli as follows.

[1086] The expression construct referred to as Ra12-P501S-C was designed to have a 6 HisTag at the N-terminal enc, followed by the M. tuberculosis antigen Ra12 (SEQ ID NO: 819) and then the C-terminal portion of P510S (amino residues 1176-1261 of SEQ ID NO: 538). Full-length P510S was used to amplify the P510S-C fragment by PCR using the primers AW056 and AW057 (SEQ ID NO: 820 and 821, respectively). AW056 is a sense cloning primer with an EcoRI site. AW057 is an antisense primer with stop and XhoI sites. The amplified P501S fragment and Ra12/pCRX1 were digested with EcoRI and XhoI and then purified. The insert and vector were ligated together and transformed into NovaBlue. Colonies were randomly screened for insert and sequences. For protein expression, the expression construct was transformed into E. coli BL21 (DE3) CodonPlus-RIL competent cells. A mini-induction screen was performed to optimize the expression conditions. After induction the cells grew well, achieving OD 600 nm greater than 2.0 after 3 hours. Coomassie stain SDS-PAGE showed a highly over-expressed band at approx. 30 kD. Though this is higher than the expected molecular weight, western blot analysis was positive, showing this band to be the His tag-containing protein. The optimized culture conditions are as follows. Dilute overnight culture/daytime culture (LB+kanamycin+chloramphenicol) into 2× YT (with kanamycin and chloramphenicol) at a ratio of 25 ml culture to 1 liter 2× YT. Allow to grow at 37° C. until OD600 0.6. Take an aliquot out as TO sample. Add 1 mM IPTG and allow to grow at 30° C. for 3 hours. Take out a T3 sample, spin down cells and store at −80° C. The determined cDNA and amino acid sequences for the Ra12-P510S-C construct are provided in SEQ ID NO: 822 and 825, respectively.

[1087] The expression construct P510S-C was designed to have a 5′ added start codon and a glycine (GGA) codon and then the P510S C terminal fragment followed by the in frame 6× histidine tag and stop codon from the pET28b vector. The cloning strategy is similar to that used for Ra12-P510S-C, except that the PCR primers employed were those shown in SEQ ID NO: 828 and 829, respectively and the NcoI/Xhol cut in pET28b was used. The primer of SEQ ID NO: 828 created a 5′ NcoI site and added a start codon. The antisense primer of SEQ ID NO: 829 creates a XhoI site on P510S C terminal fragment. Clones were confirmed by sequencing. For protein expression, the expression construct was transformed into E. coli BL21 (DE3) CodonPlus-RIL competent cells. An OD600 of greater than 2.0 was obtained 30 hours after induction. Coomassie stained SDS-PAGE showed an over-expressed band at about 11 kD. Western blot analysis confirmed that the band was P510S-C, as did N-terminal protein sequencing. The optimized culture conditions are as follows: dilute overnight culture/daytime culture (LB+kanamycin+chloramphenicol) into 2× YT (+kanamycin and chloramphenicol) at a ratio of 25 mL culture to 1 liter 2× YT, and allow to grow at 37° C. until an OD 600 of about 0.5 is reached. Take out an aliquot as TO sample. Add 1 mM IPTG and allow to grow at 30° C. for 3 hours. Spin down the cells and store at −80° C. until purification. The determined cDNA and amino acid sequences for the P510S-C construct are shown in SEQ ID NO: 823 and 826, respectively.

[1088] The predicted third extracellular domain of P510S (P510S-E3; residues 328-676 of SEQ ID NO: 538) was expressed in E. coli as follows. The P510S fragment was amplified by PCR using the primers shown in SEQ ID NO: 830 and 831. The primer of SEQ ID NO: 830 is a sense primer with an NdeI site for use in ligating into pPDM. The primer of SEQ ID NO: 831 is an antisense primer with an added XhoI site for use in ligating into pPDM. The resulting fragment was cloned to pPDM at the NdeI and XhoI sites. Clones were confirmed by sequencing. For protein expression, the clone ws transformed into E. coli BL21 (DE3) CodonPlus-RIL competent cells. After induction, an OD600 of greater than 2.0 was achieved after 3 hours. Coomassie stained SDS-PAGE showed an over-expressed band at about 39 kD, and N-terminal sequencing confirmed the N-terminal to be that of P510S-E3. Optimized culture conditions are as follows: dilute overnight culture/daytime culture (LB+kanamycin+chloramphenicol) into 2× YT (kanamycin and chloramphenicol) at a ratio of 25 ml culture to 1 liter 2× YT. Allow to grow at 37° C. until OD 600 equals 0.6. Take out an aliquot as TO sample. Add 1 mM IPTG and allow to grow at 30° C. for 3 hours. Take out a T3 sample, spin down the cells and store at −80° C. until purification. The determined cDNA and amino acid sequences for the P501S-E3 construct are provided in SEQ ID NO: 824 and 827, respectively.

[1089] g) Expression of P775S in E. Coli

[1090] The antigen P775P contains multiple open reading frames (ORF). The third ORF, encoding the protein of SEQ ID NO: 483, has the best emotif score. An expression fusion construct containing the M. tuberculosis antigen Ra12 (SEQ ID NO: 819) and P775P-ORF3 with an N-terminal 6× HisTag was prepared as follows. P775P-ORF3 was amplified using the sense PCR primers of SEQ ID NO: 832 and the anti-sense PCR primer of SEQ ID NO: 833. The PCR amplified fragment of P775P and Ra12/pCRX1 were digested with the restriction enzymes EcoRI and XhoI. Vector and insert were ligated and then transformed into NovaBlue cells. Colonies were randomly screened for insert and then sequenced. A clone having the desired sequence was transformed into E. coli BL21 (DE3) CodonPlus-RIL competent cells. Two hours after induction, the cell density peaked at OD600 of approximately 1.8. Coomassie stained SDS-PAGE showed an over-expressed band at about 31 kD. Western blot using 6× HisTag antibody confirmed that the band was Ra12-P775P-ORF3. The determined cDNA and amino acid sequences for the fusion construct are provided in SEQ ID NO: 834 and 835, respectively.

[1091] H) Expression of a P703P His Tag Fusion Protein in E. Coli

[1092] The cDNA for the coding region of P703P was prepared by PCR using the primers of SEQ ID NO: 836 and 837. The PCR product was digested with EcoRI restriction enzyme, gel purified and cloned into a modified pET28 vector with a His tag in frame, which had been digested with Eco72I and EcoRi restriction enzymes. The correct construct was confirmed by DNA sequence analysis and then transformed into E. coli BL21 (DE3) pLys S expression host cells. The determined amino acid and cDNA sequences for the expressed recombinant P703P are provided in SEQ ID NO: 838 and 839, respectively.

[1093] I) Expression of a P705P His Tag Fusion Protein in E. coli

[1094] The cDNA for the coding region of P705P was prepared by PCR using the primers of SEQ ID NO: 840 and 841. The PCR product was digested with EcoRI restriction enzyme, gel purified and cloned into a modified pET28 vector with a His tag in frame, which had been digested with Eco72I and EcoRI restriction enzymes. The correct construct was confirmed by DNA sequence analysis and then transformed into E. coli BL21 (DE3) pLys S and BL21 (DE3) CodonPlus expression host cells. The determined amino acid and cDNA sequences for the expressed recombinant P705P are provided in SEQ ID NO: 842 and 843, respectively.

[1095] J) Expression of a P711 P His Tag Fusion Protein in E. Coli

[1096] The cDNA for the coding region of P711P was prepared by PCR using the primers of SEQ ID NO: 844 and 845. The PCR product was digested with EcoRI restriction enzyme, gel purified and cloned into a modified pET28 vector with a His tag in frame, which had been digested with Eco72I and EcoRI restriction enzymes. The correct construct was confirmed by DNA sequence analysis and then transformed into E. coli BL21 (DE3) pLys S and BL21 (DE3) CodonPlus expression host cells. The determined amino acid and cDNA sequences for the expressed recombinant P711P are provided in SEQ ID NO: 846 and 847, respectively.

[1097] K) Expression of P767P in E. Coli

[1098] The full-length coding region of P767P (amino acids 2-374 of SEQ ID NO: 590) was amplified by PCR using the primers PDM-468 and PDM-469 (SEQ ID NO: 935 and 936, respectively). DNA amplification was performed using 10 μl 10× Pfu buffer, 1 μl 10 mM dNTPs, 2 μl each of the PCR primers at 10 μM concentration, 83 μl water, 1.5 μl Pfu DNA polymerase (Stratagene, La Jolla, Calif.) and 1 μl DNA at 100 ng/μl. Denaturation at 96° C. was performed for 2 min, followed by 40 cycles of 96° C. for 20 sec, 66° C. for 15 sec and by 72° C. for 2 min., and lastly by 1 cycle of 72° C. for 4 min. The PCR product was digested with XhoI and cloned into a modified pET28 vector with a histidine tag in frame on the 5′ end that was digested with Eco72I and XhoI. The construct was confirmed to be correct through sequence analysis and transformed into E. coli BL21 pLysS and BL21 CodonPlus RP cells. The cDNA coding region for the recombinant B767P protein is provided in SEQ ID NO: 938, with the corresponding amino acid sequence being provided in SEQ ID NO: 941. The full-length P767P did not express at high enough levels for detection or purification.

[1099] A truncated coding region of P767P (referred to as B767P-B; amino acids 47-374 of SEQ ID NO: 590) was amplified by PCR using the primers PDM-573 and PDM-469 (SEQ ID NO: 937 and 936, respectively) and the PCR conditions described above for full-length P767P. The PCR product was digested with XhoI and cloned into the modified pET28 vector that was digested with Eco72I and XhoI. The construct was confirmed to be correct through sequence analysis and transformed into E. coli BL21 pLysS and BL21 CodonPlus RP cells. The protein was found to be expressed in the inclusion body pellet. The coding region for the expressed B767P-B protein is provided in SEQ ID NO: 939, with the corresponding amino acid sequence being provided in SEQ ID NO: 940.

### Example 18

### Preparation and Characterization of Antibodies Against Prostate-Specific Polypeptides

[1100] a) Preparation and Characterization of Polyclonal Antibodies Against P703P, P504S and P509S

[1101] Polyclonal antibodies against P703P, P504S and P509S were prepared as follows.

[1102] Each prostate tumor antigen expressed in an E. coli recombinant expression system was grown overnight in LB broth with the appropriate antibiotics at 37° C. in a shaking incubator. The next morning, 10 ml of the overnight culture was added to 500 ml to 2× YT plus appropriate antibiotics in a 2L-baffled Erlenmeyer flask. When the Optical Density (at 560 μm) of the culture reached 0.4-0.6, the cells were induced with IPTG (1 mM). Four hours after induction with IPTG, the cells were harvested by centrifugation. The cells were then washed with phosphate buffered saline and centrifuged again. The supernatant was discarded and the cells were either frozen for future use or immediately processed. Twenty ml of lysis buffer was added to the cell pellets and vortexed. To break open the E. coli cells, this mixture was then run through the French Press at a pressure of 16,000 psi. The cells were then centrifuged again and the supernatant and pellet were checked by SDS-PAGE for the partitioning of the recombinant protein. For proteins that localized to the cell pellet, the pellet was resuspended in 10 mM Tris pH 8.0, 1% CHAPS and the inclusion body pellet was washed and centrifuged again. This procedure was repeated twice more. The washed inclusion body pellet was solubilized with either 8 M urea or 6 M guanidine HCl containing 10 mM Tris pH 8.0 plus 10 mM imidazole. The solubilized protein was added to 5 ml of nickel-chelate resin (Qiagen) and incubated for 45 min to 1 hour at room temperature with continuous agitation. After incubation, the resin and protein mixture were poured through a disposable column and the flow through was collected. The column was then washed with 10-20 column volumes of the solubilization buffer. The antigen was then eluted from the column using 8M urea, 10 mM Tris pH 8.0 and 300 mM imidazole and collected in 3 ml fractions. A SDS-PAGE gel was run to determine which fractions to pool for further purification.

[1103] As a final purification step, a strong anion exchange resin such as HiPrepQ (Biorad) was equilibrated with the appropriate buffer and the pooled fractions from above were loaded onto the column. Each antigen was eluted off the column with a increasing salt gradient. Fractions were collected as the column was run and another SDS-PAGE gel was run to determine which fractions from the column to pool. The pooled fractions were dialyzed against 10 mM Tris pH 8.0. The proteins were then vialed after filtration through a 0.22 micron filter and the antigens were frozen until needed for immunization.

[1104] Four hundred micrograms of each prostate antigen was combined with 100 micrograms of muramyldipeptide (MDP). Every four weeks rabbits were boosted with 100 micrograms mixed with an equal volume of Incomplete Freund's Adjuvant (IFA). Seven days following each boost, the animal was bled. Sera was generated by incubating the blood at 4° C. for 12-4 hours followed by centrifugation.

[1105] Ninety-six well plates were coated with antigen by incubating with 50 microliters (typically 1 microgram) of recombinant protein at 4° C. for 20 hours. 250 microliters of BSA blocking buffer was added to the wells and incubated at room temperature for 2 hours. Plates were washed 6 times with PBS/0.01% Tween. Rabbit sera was diluted in PBS. Fifty microliters of diluted sera was added to each well and incubated at room temperature for 30 min. Plates were washed as described above before 50 microliters of goat anti-rabbit horse radish peroxidase (HRP) at a 1:10000 dilution was added and incubated at room temperature for 30 min. Plates were again washed as described above and 100 microliters of TMB microwell peroxidase substrate was added to each well. Following a 15 min incubation in the dark at room temperature, the calorimetric reaction was stopped with 100 microliters of IN H₂SO₄ and read immediately at 450 nm. All polyclonal antibodies showed immunoreactivity to the appropriate antigen.

[1106] b) Preparation and Characterization of Antibodies against P501S

[1107] A murine monoclonal antibody directed against the carboxy-terminus of the prostate-specific antigen P501S was prepared as follows.

[1108] A truncated fragment of P501S (amino acids 355-526 of SEQ ID NO: 113) was generated and cloned into the pET28b vector (Novagen) and expressed in E. coli as a thioredoxin fusion protein with a histidine tag. The trx-P501S fusion protein was purified by nickel chromatography, digested with thrombin to remove the trx fragment and further purified by an acid precipitation procedure followed by reverse phase HPLC.

[1109] Mice were immunized with truncated P501S protein. Serum bleeds from mice that potentially contained anti-P501S polyclonal sera were tested for P501S-specific reactivity using ELISA assays with purified P501S and trx-P501S proteins. Serum bleeds that appeared to react specifically with P501S were then screened for P501S reactivity by Western analysis. Mice that contained a P501S-specific antibody component were sacrificed and spleen cells were used to generate anti-P501S antibody producing hybridomas using standard techniques. Hybridoma supernatants were tested for P501S-specific reactivity initially by ELISA, and subsequently by FACS analysis of reactivity with P501S transduced cells. Based on these results, a monoclonal hybridoma referred to as 10E3 was chosen for further subcloning. A number of subclones were generated, tested for specific reactivity to P501S using ELISA and typed for IgG isotype. The results of this analysis are shown below in Table V. Of the 16 subclones tested, the monoclonal antibody 10E3-G4-D3 was selected for further study.

TABLE V
Isotype analysis of murine anti-P501S monoclonal antibodies

| | | Estimated [Ig]in |
|---|---|---|
| Hybridoma clone | Isotype | supernatant (μg/ml) |
| 4D11 | IgG1 | 14.6 |
| 1G1 | IgG1 | 0.6 |
| 4F6 | IgG1 | 72 |
| 4H5 | IgG1 | 13.8 |
| 4H5-E12 | IgG1 | 10.7 |
| 4H5-EH2 | IgG1 | 9.2 |
| 4H5-H2-A10 | IgG1 | 10 |
| 4H5-H2-A3 | IgG1 | 12.8 |
| 4H5-H2-A10-G6 | IgG1 | 13.6 |
| 4H5-H2-B11 | IgG1 | 12.3 |
| 10E3 | IgG2a | 3.4 |
| 10E3-D4 | IgG2a | 3.8 |
| 10E3-D4-G3 | IgG2a | 9.5 |
| 10E3-D4-G6 | IgG2a | 10.4 |
| 10E3-E7 | IgG2a | 6.5 |
| 8H12 | IgG2a | 0.6 |

[1110] The specificity of 10E3-G4-D3 for P501S was examined by FACS analysis. Specifically, cells were fixed (2% formaldehyde, 10 minutes), permeabilized (0.1% saponin, 10 minutes) and stained with 10E3-G4-D3 at 0.5-1 μg/ml, followed by incubation with a secondary, FITC-conjugated goat anti-mouse Ig antibody (Pharmingen, San Diego, Calif.). Cells were then analyzed for FITC fluorescence using an Excalibur fluorescence activated cell sorter. For FACS analysis of transduced cells, B-LCL were retrovirally transduced with P501S. For analysis of infected cells, B-LCL were infected with a vaccinia vector that expresses P501S. To demonstrate specificity in these assays, B-LCL transduced with a different antigen (P703P) and uninfected B-LCL vectors were utilized. 10E3-G4-D3 was shown to bind with P501S-transduced B-LCL and also with P501S-infected B-LCL, but not with either uninfected cells or P703P-transduced cells.

[1111] To determine whether the epitope recognized by 10E3-G4-D3 was found on the surface or in an intracellular compartment of cells, B-LCL were transduced with P501S or HLA-B8 as a control antigen and either fixed and permeabilized as described above or directly stained with 10E3-G4-D3 and analyzed as above. Specific recognition of P501S by 10E3-G4-D3 was found to require permeabilization, suggesting that the epitope recognized by this antibody is intracellular.

[1112] The reactivity of 10E3-G4-D3 with the three prostate tumor cell lines Lncap, PC-3 and DU-145, which are known to express high, medium and very low levels of P501S, respectively, was examined by permeabilizing the cells and treating them as described above. Higher reactivity of 10E3-G4-D3 was seen with Lncap than with PC-3, which in turn showed higher reactivity that DU-145. These results are in agreement with the real time PCR and demonstrate that the antibody specifically recognizes P501S in these tumor cell lines and that the epitope recognized in prostate tumor cell lines is also intracellular.

[1113] Specificity of 10E3-G4-D3 for P501S was also demonstrated by Western blot analysis. Lysates from the prostate tumor cell lines Lncap, DU-145 and PC-3, from P501S-transiently transfected HEK293 cells, and from non-transfected HEK293 cells were generated. Western blot analysis of these lysates with 10E3-G4-D3 revealed a 46 kDa immunoreactive band in Lncap, PC-3 and P501S-transfected HEK cells, but not in DU-145 cells or non-transfected HEK293 cells. P501S mRNA expression is consistent with these results since semi-quantitative PCR analysis revealed that P501S mRNA is expressed in Lncap, to a lesser but detectable level in PC-3 and not at all in DU-145 cells. Bacterially expressed and purified recombinant P501S (referred to as P501SStr2) was recognized by 10E3-G4-D3 (24 kDa), as was full-length P501S that was transiently expressed in HEK293 cells using either the expression vector VR1012 or pCEP4. Although the predicted molecular weight of P501S is 60.5 kDa, both transfected and “native” P501S run at a slightly lower mobility due to its hydrophobic nature.

[1114] Immunohistochemical analysis was performed on prostate tumor and a panel of normal tissue sections (prostate, adrenal, breast, cervix, colon, duodenum, gall bladder, ileum, kidney, ovary, pancreas, parotid gland, skeletal muscle, spleen and testis). Tissue samples were fixed in formalin solution for 24 hours and embedded in paraffin before being sliced into 10 micron sections. Tissue sections were permeabilized and incubated with 10E3-G4-D3 antibody for 1 hr. HRP-labeled anti-mouse followed by incubation with DAB chromogen was used to visualize P501S immunoreactivity. P501S was found to be highly expressed in both normal prostate and prostate tumor tissue but was not detected in any of the other tissues tested.

[1115] To identify the epitope recognized by 10E3-G4-D3, an epitope mapping approach was pursued. A series of 13 overlapping 20-21 mers (5 amino acid overlap; SEQ ID NO: 489-501) was synthesized that spanned the fragment of P501S used to generate 10E3-G4-D3. Flat bottom 96 well microtiter plates were coated with either the peptides or the P501S fragment used to immunize mice, at 1 microgram/ml for 2 hours at 37° C. Wells were then aspirated and blocked with phosphate buffered saline containing 1% (w/v) BSA for 2 hours at room temperature, and subsequently washed in PBS containing 0.1% Tween 20 (PBST). Purified antibody 10E3-G4-D3 was added at 2 fold dilutions (1000 ng -16 ng) in PBST and incubated for 30 minutes at room temperature. This was followed by washing 6 times with PBST and subsequently incubating with HRP-conjugated donkey anti-mouse IgG (H+L)Affinipure F(ab′) fragment (Jackson Immunoresearch, West Grove, Pa.) at 1:20000 for 30 minutes. Plates were then washed and incubated for 15 minutes in tetramethyl benzidine. Reactions were stopped by the addition of IN sulfuric acid and plates were read at 450 nm using an ELISA plate reader. As shown in FIG. 8, reactivity was seen with the peptide of SEQ ID NO: 496 (corresponding to amino acids 439-459 of P501S) and with the P501S fragment but not with the remaining peptides, demonstrating that the epitope recognized by 10E3-G4-D3 is localized to amino acids 439-459 of SEQ ID NO: 113.

[1116] In order to further evaluate the tissue specificity of P501S, multi-array immunohistochemical analysis was performed on approximately 4700 different human tissues encompassing all the major normal organs as well as neoplasias derived from these tissues. Sixty-five of these human tissue samples were of prostate origin. Tissue sections 0.6 mm in diameter were formalin-fixed and paraffin embedded. Samples were pretreated with HIER using 10 mM citrate buffer pH 6.0 and boiling for 10 min. Sections were stained with 10E3-G4-D3 and P501S immunoreactivity was visualized with HRP. All the 65 prostate tissues samples (5 normal, 55 untreated prostate tumors, 5 hormone refractory prostate tumors) were positive, showing distinct perinuclear staining. All other tissues examined were negative for P501S expression.

[1117] c) Preparation and Characterization of Antibodies Against P503S

[1118] A fragment of P503S (amino acids 113-241 of SEQ ID NO: 114) was expressed and purified from bacteria essentially as described above for P501S and used to immunize both rabbits and mice. Mouse monoclonal antibodies were isolated using standard hybridoma technology as described above. Rabbit monoclonal antibodies were isolated using Selected Lymphocyte Antibody Method (SLAM) technology at Immgenics Pharmaceuticals (Vancouver, BC, Canada). Table VI, below, lists the monoclonal antibodies that were developed against P503S.

TABLE VI

| Antibody | Species |
|---|---|
| 20D4 | Rabbit |
| JA1 | Rabbit |
| 1A4 | Mouse |
| 1C3 | Mouse |
| 1C9 | Mouse |
| 1D12 | Mouse |
| 2A11 | Mouse |
| 2H9 | Mouse |
| 4H7 | Mouse |
| 8A8 | Mouse |
| 8D10 | Mouse |
| 9C12 | Mouse |
| 6D12 | Mouse |

[1119] The DNA sequences encoding the complementarity determining regions (CDRs) for the rabbit monoclonal antibodies 20D4 and JA1 were determined and are provided in SEQ ID NO: 502 and 503, respectively.

[1120] In order to better define the epitope binding region of each of the antibodies, a series of overlapping peptides were generated that span amino acids 109-213 of SEQ ID NO: 114. These peptides were used to epitope map the anti-P503S monoclonal antibodies by ELISA as follows. The recombinant fragment of P503S that was employed as the immunogen was used as a positive control. Ninety-six well microtiter plates were coated with either peptide or recombinant antigen at 20 ng/well overnight at 4° C. Plates were aspirated and blocked with phosphate buffered saline containing 1% (w/v) BSA for 2 hours at room temperature then washed in PBS containing 0.1% Tween 20 (PBST). Purified rabbit monoclonal antibodies diluted in PBST were added to the wells and incubated for 30 min at room temperature. This was followed by washing 6 times with PBST and incubation with Protein-A HRP conjugate at a 1:2000 dilution for a further 30 min. Plates were washed six times in PBST and incubated with tetramethylbenzidine (TMB) substrate for a further 15 min. The reaction was stopped by the addition of IN sulfuric acid and plates were read at 450 nm using at ELISA plate reader. ELISA with the mouse monoclonal antibodies was performed with supernatants from tissue culture run neat in the assay.

[1121] All of the antibodies bound to the recombinant P503S fragment, with the exception of the negative control SP2 supernatant. 20D4, JA1 and 1D12 bound strictly to peptide #2101 (SEQ ID NO: 504), which corresponds to amino acids 151-169 of SEQ ID NO: 114. 1C3 bound to peptide #2102 (SEQ ID NO: 505), which corresponds to amino acids 165-184 of SEQ ID NO: 114. 9C12 bound to peptide #2099 (SEQ ID NO: 522), which corresponds to amino acids 120-139 of SEQ ID NO: 114. The other antibodies bind to regions that were not examined in these studies.

[1122] Subsequent to epitope mapping, the antibodies were tested by FACS analysis on a cell line that stably expressed P503S to confirm that the antibodies bind to cell surface epitopes. Cells stably transfected with a control plasmid were employed as a negative control. Cells were stained live with no fixative. 0.5 ug of anti-P503S monoclonal antibody was added and cells were incubated on ice for 30 min before being washed twice and incubated with a FITC-labelled goat anti-rabbit or mouse secondary antibody for 20 min. After being washed twice, cells were analyzed with an Excalibur fluorescent activated cell sorter. The monoclonal antibodies 1C3, 1D12, 9C12, 20D4 and JA1, but not 8D3, were found to bind to a cell surface epitope of P503S.

[1123] In order to determine which tissues express P503S, immunohistochemical analysis was performed, essentially as described above, on a panel of normal tissues (prostate, adrenal, breast, cervix, colon, duodenum, gall bladder, ileum, kidney, ovary, pancreas, parotid gland, skeletal muscle, spleen and testis). HRP-labeled anti-mouse or anti-rabbit antibody followed by incubation with TMB was used to visualize P503S immunoreactivity. P503S was found to be highly expressed in prostate tissue, with lower levels of expression being observed in cervix, colon, ileum and kidney, and no expression being observed in adrenal, breast, duodenum, gall bladder, ovary, pancreas, parotid gland, skeletal muscle, spleen and testis.

[1124] Western blot analysis was used to characterize anti-P503S monoclonal antibody specificity. SDS-PAGE was performed on recombinant (rec) P503S expressed in and purified from bacteria and on lysates from HEK293 cells transfected with full length P503S. Protein was transferred to nitrocellulose and then Western blotted with each of the anti-P503S monoclonal antibodies (20D4, JA1, 1D12, 6D12 and 9C12) at an antibody concentration of 1 ug/ml. Protein was detected using horse radish peroxidase (HRP) conjugated to either a goat anti-mouse monoclonal antibody or to protein A-sepharose. The monoclonal antibody 20D4 detected the appropriate molecular weight 14 kDa recombinant P503S (amino acids 113-241) and the 23.5 kDa species in the HEK293 cell lysates transfected with full length P503S. Other anti-P503S monoclonal antibodies displayed similar specificity by Western blot.

[1125] d) Preparation and Characterization of Antibodies Against P703P

[1126] Rabbits were immunized with either a truncated (P703Ptr1; SEQ ID NO: 172) or full-length mature form (P703Pfl; SEQ ID NO: 523) of recombinant P703P protein was expressed in and purified from bacteria as described above. Affinity purified polyclonal antibody was generated using immunogen P703Pfl or P703Ptr1 attached to a solid support. Rabbit monoclonal antibodies were isolated using SLAM technology at Immgenics Pharmaceuticals. Table VII below lists both the polyclonal and monoclonal antibodies that were generated against P703P.

TABLE VII

| Antibody | Immunogen | Species/type |
|---|---|---|
| Aff. Purif. P703P (truncated); #2594 | P703Ptrl | Rabbit polyclonal |
| Aff. Purif. P703P (full length); #9245 | P703Pfl | Rabbit polyclonal |
| 2D4 | P703Ptrl | Rabbit monoclonal |
| 8H2 | P703Ptrl | Rabbit monoclonal |
| 7H8 | P703Ptrl | Rabbit monoclonal |

[1127] The DNA sequences encoding the complementarity determining regions (CDRs) for the rabbit monoclonal antibodies 8H2, 7H8 and 2D4 were determined and are provided in SEQ ID NO: 506-508, respectively.

[1128] Epitope mapping studies were performed as described above. Monoclonal antibodies 2D4 and 7H8 were found to specifically bind to the peptides of SEQ ID NO: 509 (corresponding to amino acids 145-159 of SEQ ID NO: 172) and SEQ ID NO: 510 (corresponding to amino acids 11-25 of SEQ ID NO: 172), respectively. The polyclonal antibody 2594 was found to bind to the peptides of SEQ ID NO: 511-514, with the polyclonal antibody 9427 binding to the peptides of SEQ ID NO: 515-517.

[1129] The specificity of the anti-P703P antibodies was determined by Western blot analysis as follows. SDS-PAGE was performed on (1) bacterially expressed recombinant antigen; (2) lysates of HEK293 cells and Ltk−/− cells either untransfected or transfected with a plasmid expressing full length P703P; and (3) supernatant isolated from these cell cultures. Protein was transferred to nitrocellulose and then Western blotted using the anti-P703P polyclonal antibody #2594 at an antibody concentration of 1 ug/ml. Protein was detected using horse radish peroxidase (HRP) conjugated to an anti-rabbit antibody. A 35 kDa immunoreactive band could be observed with recombinant P703P. Recombinant P703P runs at a slightly higher molecular weight since it is epitope tagged. In lysates and supernatants from cells transfected with full length P703P, a 30 kDa band corresponding to P703P was observed. To assure specificity, lysates from HEK293 cells stably transfected with a control plasmid were also tested and were negative for P703P expression. Other anti-P703P antibodies showed similar results.

[1130] Immunohistochemical studies were performed as described above, using anti-P703P monoclonal antibody. P703P was found to be expressed at high levels in normal prostate and prostate tumor tissue but was not detectable in all other tissues tested (breast tumor, lung tumor and normal kidney).

[1131] e) Preparation and Characterization of Antibodies Against P504S

[1132] Full-length P504S (SEQ ID NO: 108) was expressed and purified from bacteria essentially as described above for P501S and employed to raise rabbit monoclonal antibodies using Selected Lymphocyte Antibody Method (SLAM) technology at Immgenics Pharmaceuticals (Vancouver, BC, Canada). The anti-P504S monoclonal antibody 13H4 was shown by Western blot to bind to both expressed recombinant P504S and to native P504S in tumor cells.

[1133] Immunohistochemical studies using 13H4 to assess P504S expression in various prostate tissues were performed as described above. A total of 104 cases, including 65 cases of radical prostatectomies with prostate cancer (PC), 26 cases of prostate biopsies and 13 cases of benign prostate hyperplasia (BPH), were stained with the anti-P504S monoclonal antibody 13H4. P504S showed strongly cytoplasmic granular staining in 64/65 (98.5%) of PCs in prostatectomies and 26/26 (100% ) of PCs in prostatic biopsies. P504S was stained strongly and diffusely in carcinomas (4+ in 91.2% of cases of PC; 3+ in 5.5%; 2+ in 2.2% and 1+ in 1.1%) and high grade prostatic intraepithelial neoplasia (4+ in all cases). The expression of P504S did not vary with Gleason score. Only 17/91 (18.7%) of cases of NP/BPH around PC and 2/13 (15.4%) of BPH cases were focally (1+, no 2+ to 4+ in all cases) and weakly positive for P504S in large glands. Expression of P504S was not found in small atrophic glands, postatrophic hyperplasia, basal cell hyperplasia and transitional cell metaplasia in either biopsies or prostatectomies. P504S was thus found to be over-expressed in all Gleason scores of prostate cancer (98.5 to 100% of sensitivity) and exhibited only focal positivities in large normal glands in 19/104 of cases (82.3% of specificity). These findings indicate that P504S may be usefully employed for the diagnosis of prostate cancer.

### Example 19

### Characterization of Cell Surface Expression and Chromosome Localization of the Prostate-Specific Antigen P501S

[1134] This example describes studies demonstrating that the prostate-specific antigen P501S is expressed on the surface of cells, together with studies to determine the probable chromosomal location of P501S.

[1135] The protein P501S (SEQ ID NO: 113) is predicted to have 11 transmembrane domains. Based on the discovery that the epitope recognized by the anti-P501S monoclonal antibody 10E3-G4-D3 (described above in Example 17) is intracellular, it was predicted that following transmembrane determinants would allow the prediction of extracellular domains of P501S. FIG. 9 is a schematic representation of the P501S protein showing the predicted location of the transmembrane domains and the intracellular epitope described in Example 17. Underlined sequence represents the predicted transmembrane domains, bold sequence represents the predicted extracellular domains, and italicized sequence represents the predicted intracellular domains. Sequence that is both bold and underlined represents sequence employed to generate polyclonal rabbit serum. The location of the transmembrane domains was predicted using HHMTOP as described by Tusnady and Simon (Principles Governing Amino Acid Composition of Integral Membrane Proteins: Applications to Topology Prediction, J. Mol. Biol. 283:489-506, 1998).

[1136] Based on FIG. 9, the P501S domain flanked by the transmembrane domains corresponding to amino acids 274-295 and 323-342 is predicted to be extracellular. The peptide of SEQ ID NO: 518 corresponds to amino acids 306-320 of P501S and lies in the predicted extracellular domain. The peptide of SEQ ID NO: 519, which is identical to the peptide of SEQ ID NO: 518 with the exception of the substitution of the histidine with an asparginine, was synthesized as described above. A Cys-Gly was added to the C-terminus of the peptide to facilitate conjugation to the carrier protein. Cleavage of the peptide from the solid support was carried out using the following cleavage mixture: trifluoroacetic acid:ethanediol:thioanisol:water:phenol (40:1:2:2:3). After cleaving for two hours, the peptide was precipitated in cold ether. The peptide pellet was then dissolved in 10% v/v acetic acid and lyophilized prior to purification by C 18 reverse phase hplc. A gradient of 5-60% acetonitrile (containing 0.05% TFA) in water (containing 0.05% TFA) was used to elute the peptide. The purity of the peptide was verified by hplc and mass spectrometry, and was determined to be >95%. The purified peptide was used to generate rabbit polyclonal antisera as described above.

[1137] Surface expression of P501S was examined by FACS analysis. Cells were stained with the polyclonal anti-P501S peptide serum at 10 μg/ml, washed, incubated with a secondary FITC-conjugated goat anti-rabbit Ig antibody (ICN), washed and analyzed for FITC fluorescence using an Excalibur fluorescence activated cell sorter. For FACS analysis of transduced cells, B-LCL were retrovirally transduced with P501S. To demonstrate specificity in these assays, B-LCL transduced with an irrelevant antigen (P703P) or nontransduced were stained in parallel. For FACS analysis of prostate tumor cell lines, Lncap, PC-3 and DU-145 were utilized. Prostate tumor cell lines were dissociated from tissue culture plates using cell dissociation medium and stained as above. All samples were treated with propidium iodide (PI) prior to FACS analysis, and data was obtained from PI-excluding (i e., intact and non-permeabilized) cells. The rabbit polyclonal serum generated against the peptide of SEQ ID NO: 519 was shown to specifically recognize the surface of cells transduced to express P501S, demonstrating that the epitope recognized by the polyclonal serum is extracellular.

[1138] To determine biochemically if P501S is expressed on the cell surface, peripheral membranes from Lncap cells were isolated and subjected to Western blot analysis. Specifically, Lncap cells were lysed using a dounce homogenizer in 5 ml of homogenization buffer (250 mM sucrose, 10 mM HEPES, lmM EDTA, pH 8.0, 1 complete protease inhibitor tablet (Boehringer Mannheim)). Lysate samples were spun at 1000 g for 5 min at 4° C. The supernatant was then spun at 8000g for 10 min at 4° C. Supernatant from the 8000g spin was recovered and subjected to a 100,000 g spin for 30 min at 4° C. to recover peripheral membrane. Samples were then separated by SDS-PAGE and Western blotted with the mouse monoclonal antibody 10E3-G4-D3 (described above in Example 17) using conditions described above. Recombinant purified P501S, as well as HEK293 cells transfected with and over-expressing P501S were included as positive controls for P501S detection. LCL cell lysate was included as a negative control. P501S could be detected in Lncap total cell lysate, the 8000 g (internal membrane) fraction and also in the 100,000 g (plasma membrane) fraction. These results indicate that P501S is expressed at, and localizes to, the peripheral membrane.

[1139] To demonstrate that the rabbit polyclonal antiserum generated to the peptide of SEQ ID NO: 519 specifically recognizes this peptide as well as the corresponding native peptide of SEQ ID NO: 518, ELISA analyses were performed. For these analyses, flat-bottomed 96 well microtiter plates were coated with either the peptide of SEQ ID NO: 519, the longer peptide of SEQ ID NO: 520 that spans the entire predicted extracellular domain, the peptide of SEQ ID NO: 521 which represents the epitope recognized by the P501S-specific antibody 10E3-G4-D3, or a P501S fragment (corresponding to amino acids 355-526 of SEQ ID NO: 113) that does not include the immunizing peptide sequence, at 1 μg/ml for 2 hours at 37° C. Wells were aspirated, blocked with phosphate buffered saline containing 1% (w/v) BSA for 2 hours at room temperature and subsequently washed in PBS containing 0.1% Tween 20 (PBST). Purified anti-P501S polyclonal rabbit serum was added at 2 fold dilutions (1000 ng -125 ng) in PBST and incubated for 30 min at room temperature. This was followed by washing 6 times with PBST and incubating with HRP-conjugated goat anti-rabbit IgG (H+L) Affinipure F(ab′) fragment at 1:20000 for 30 min. Plates were then washed and incubated for 15 min in tetramethyl benzidine. Reactions were stopped by the addition of 1N sulfuric acid and plates were read at 450 nm using an ELISA plate reader. As shown in FIG. 11, the anti-P501S polyclonal rabbit serum specifically recognized the peptide of SEQ ID NO: 519 used in the immunization as well as the longer peptide of SEQ ID NO: 520, but did not recognize the irrelevant P501S-derived peptides and fragments.

[1140] In further studies, rabbits were immunized with peptides derived from the P501S sequence and predicted to be either extracellular or intracellular, as shown in FIG. 9. Polyclonal rabbit sera were isolated and polyclonal antibodies in the serum were purified, as described above. To determine specific reactivity with P501S, FACS analysis was employed, utilizing either B-LCL transduced with P501S or the irrelevant antigen P703P, of B-LCL infected with vaccinia virus-expressing P501S. For surface expression, dead and non-intact cells were excluded from the analysis as described above. For intracellular staining, cells were fixed and permeabilized as described above. Rabbit polyclonal serum generated against the peptide of SEQ ID NO: 548, which corresponds to amino acids 181-198 of P501S, was found to recognize a surface epitope of P501S. Rabbit polyclonal serum generated against the peptide SEQ ID NO: 551, which corresponds to amino acids 543-553 of P501S, was found to recognize an epitope that was either potentially extracellular or intracellular since in different experiments intact or permeabilized cells were recognized by the polyclonal sera. Based on similar deductive reasoning, the sequences of SEQ ID NO: 541-547, 549 and 550, which correspond to amino acids 109-122, 539-553, 509-520, 37-54, 342-359, 295-323, 217-274, 143-160 and 75-88, respectively, of P501S, can be considered to be potential surface epitopes of P501S recognized by antibodies.

[1141] In further studies, mouse monoclonal antibodies were raised against amino acids 296 to 322 to P501S, which are predicted to be in an extracellular domain. A/J mice were immunized with P501S/adenovirus, followed by subsequent boosts with an E. coli recombinant protein, referred to as P501N, that contains amino acids 296 to 322 of P501S, and with peptide 296-322 (SEQ ID NO: 898) coupled with KLH. The mice were subsequently used for splenic B cell fusions to generate anti-peptide hybridomas. The resulting 3 clones, referred to as 4F4 (IgG1,kappa), 4G5 (IgG2a,kappa) and 9B9 (IgG1,kappa), were grown for antibody production. The 4G5 mAb was purified by passing the supernatant over a Protein A-sepharose column, followed by antibody elution using 0.2M glycine, pH 2.3. Purified antibody was neutralized by the addition of 1M Tris, pH 8, and buffer exchanged into PBS.

[1142] For ELISA analysis, 96 well plates were coated with P501S peptide 296-322 (referred to as P501-long), an irrelevant P775 peptide, P501S-N, P501TR2, P501S-long-KLH, P501S peptide 306-319 (referred to as P501-short)-KLH, or the irrelevant peptide 2073-KLH, all at a concentration of 2 ug/ml and allowed to incubate for 60 minutes at 37° C. After coating, plates were washed 5× with PBS +0.1% Tween and then blocked with PBS, 0.5% BSA, 0.4% Tween20 for 2 hours at room temperature. Following the addition of supernatants or purified mAb, the plates were incubated for 60 minutes at room temperature. Plates were washed as above and donkey anti-mouse IgHRP-linked secondary antibody was added and incubated for 30 minutes at room temperature, followed by a final washing as above. TMB peroxidase substrate was added and incubated 15 minutes at room temperature in the dark. The reaction was stopped by the addition of 1N H₂SO₄ and the OD was read at 450 nM. All three hybrid clones secreted mAb that recognized peptide 296-322 and the recombinant protein P501N.

[1143] For FACS analysis, HEK293 cells were transiently transfected with a P501S/VR1012 expression constructs using Fugene 6 reagent. After 2 days of culture, cells were harvested and washed, then incubated with purified 4G5 mAb for 30 minutes on ice. After several washes in PBS, 0.5% BSA, 0.01% azide, goat anti-mouse Ig-FITC was added to the cells and incubated for 30 minutes on ice. Cells were washed and resuspended in wash buffer including 1% propidium iodide and subjected to FACS analysis. The FACS analysis confirmed that amino acids 296-322 of P501S are in an extracellular domain and are cell surface expressed.

[1144] The chromosomal location of PSOS was determined using the GeneBridge 4 Radiation Hybrid panel (Research Genetics). The PCR primers of SEQ ID NO: 528 and 529 were employed in PCR with DNA pools from the hybrid panel according to the manufacturer's directions. After 38 cycles of amplification, the reaction products were separated on a 1.2% agarose gel, and the results were analyzed through the Whitehead Institute/MIT Center for Genome Research web server (http://www-genome.wi.mit.edu/cgi-bin/contig/rhmapper.pl) to determine the probable chromosomal location. Using this approach, P501S was mapped to the long arm of chromosome 1 at WI-9641 between q32 and q42. This region of chromosome 1 has been linked to prostate cancer susceptibility in hereditary prostate cancer (Smith et al. Science 274:1371-1374, 1996 and Berthon et al. Am. J. Hum. Genet. 62:1416-1424, 1998). These results suggest that P501S may play a role in prostate cancer malignancy.

### Example 20

### Regulation of Expression of the Prostate-Specific Antigen P501S

[1145] Steroid (androgen) hormone modulation is a common treatment modality in prostate cancer. The expression of a number of prostate tissue-specific antigens have previously been demonstrated to respond to androgen. The responsiveness of the prostate-specific antigen P501S to androgen treatment was examined in a tissue culture system as follows.

[1146] Cells from the prostate tumor cell line LNCaP were plated at 1.5×10⁶ cells/T75 flask (for RNA isolation) or 3×10⁵ cells/well of a 6-well plate (for FACS analysis) and grown overnight in RPMI 1640 media containing 10% charcoal-stripped fetal calf serum (BRL Life Technologies, Gaithersburg, MD). Cell culture was continued for an additional 72 hours in RPMI 1640 media containing 10% charcoal-stripped fetal calf serum, with 1 nM of the synthetic androgen Methyltrienolone (R1881; New England Nuclear) added at various time points. Cells were then harvested for RNA isolation and FACS analysis at 0, 1, 2, 4, 8, 16, 24, 28 and 72-hours post androgen addition. FACS analysis was performed using the anti-P501S antibody 10E3-G4-D3 and permeabilized cells.

[1147] For Northern analysis, 5-10 micrograms of total RNA was run on a formaldehyde denaturing gel, transferred to Hybond-N nylon membrane (Amersham Pharmacia Biotech, Piscataway, N.J.), cross-linked and stained with methylene blue. The filter was then prehybridized with Church's Buffer (250 mM Na₂HPO₄, 70 mM H₃PO₄, 1 mM EDTA, 1% SDS, 1% BSA in pH 7.2) at 65° C. for 1 hour. P501S DNA was labeled with 32P using High Prime random-primed DNA labeling kit (Boehringer Mannheim). Unincorporated label was removed using MicroSpin S300-HR columns (Amersham Pharmacia Biotech). The RNA filter was then hybridized with fresh Church's Buffer containing labeled cDNA overnight, washed with 1× SCP (0.1 M NaCl, 0.03 M Na₂HPO₄.7H₂O, 0.001 M Na₂EDTA), 1% sarkosyl (n-lauroylsarcosine) and exposed to X-ray film.

[1148] Using both FACS and Northern analysis, P501S message and protein levels were found in increase in response to androgen treatment.

### Example 21

### Preparation of Fusion Proteins of Prostate-Specific Antigens

[1149] This example describes the preparation of fusion proteins of the prostate-specific antigen P703P and the known prostate antigens PSA and PAP. A FUSION OF P703P WITH A TRUNCATED FORM OF THE KNOWN PROSTATE ANTIGEN PSA WAS PREPARED AS FOLLOWS. THE TRUNCATED FORM OF PSA HAS A 21 AMINO ACID DELETION AROUND THE ACTIVE SERINE SITE. THE EXPRESSION CONSTRUCT FOR THE FUSION PROTEIN ALSO HAS A RESTRICTION SITE AT 3′ END, IMMEDIATELY PRIOR TO THE TERMINATION CODON, TO AID IN ADDING cDNA FOR ADDITIONAL ANTIGENS. The full-length cDNA for PSA was obtained by RT-PCR from a pool of RNA from human prostate tumor tissues using the primers of SEQ ID NO: 607 and 608, and cloned in the vector pCR-Blunt II-TOPO. The resulting cDNA was employed as a template to make two different fragments of PSA by PCR with two sets of primers (SEQ ID NO: 609 and 610; and SEQ ID NO: 611 and 612). The PCR products having the expected size were used as templates to make truncated forms of PSA by PCR with the primers of SEQ ID NO: 611 and 613, which generated PSA (delta 208-218 in amino acids). The cDNA for the mature form of P703P with a 6× histidine tag at the 5′ end was prepared by PCR with P703P and the primers of SEQ ID NO: 614 and 615. The cDNA for the fusion of P703P with the truncated form of PSA (referred to as FOPP) was then obtained by PCR using the modified P703P cDNA and the truncated form of PSA cDNA as templates and the primers of SEQ ID NO: 614 and 615. The FOPP cDNA was cloned into the NdeI site and XhoI site of the expression vector pCRX1, and confirmed by DNA sequencing. The determined cDNA sequence for the fusion construct FOPP is provided in SEQ ID NO: 616, with the amino acid sequence being provided in SEQ ID NO: 617.

[1150] The fusion FOPP was expressed as a single recombinant protein in E. coli as follows. The expression plasmid pCRX1FOPP was transformed into the E. coli strain BL21-CodonPlus RIL. The transformant was shown to express FOPP protein upon induction with 1 mM IPTG. The culture of the corresponding expression clone was inoculated into 25 ml LB broth containing 50 ug/ml kanamycin and 34 ug/ml chloramphenicol, grown at 37° C. to OD600 of about 1, and stored at 4° C. overnight. The culture was diluted into 1 liter of TB LB containing 50 ug/ml kanamycin and 34 ug/ml chloramphenicol, and grown at 37° C. to OD600 of 0.4. IPTG was added to a final concentration of 1 mM, and the culture was incubated at 30° C. for 3 hours. The cells were pelleted by centrifugation at 5,000 RPM for 8 min. To purify the protein, the cell pellet was suspended in 25 ml of 10 mM Tris-Cl pH 8.0, 2mM PMSF, complete protease inhibitor and 15 ug lysozyme. The cells were lysed at 4° C. for 30 minutes, sonicated several times and the lysate centrifuged for 30 minutes at 10,000× g. The precipitate, which contained the inclusion body, was washed twice with 10 mM Tris-Cl pH 8.0 and 1% CHAPS. The inclusion body was dissolved in 40 ml of 10 mM Tris-Cl pH 8.0, 100 mM sodium phosphate and 8 M urea. The solution was bound to 8 ml Ni-NTA (Qiagen) for one hour at room temperature. The mixture was poured into a 25 ml column and washed with 50 ml of 10 mM Tris-Cl pH 6.3, 100 mM sodium phosphate, 0.5% DOC and 8M urea. The bound protein was eluted with 350 mM imidazole, 10 mM Tris-Cl pH 8.0, 100 mM sodium phosphate and 8 M urea. The fractions containing FOPP proteins were combined and dialyzed extensively against 10 mM Tris-Cl pH 4.6, aliquoted and stored at −70° C.

[1151] A fusion of the A. tuberculosis antigen Ra12 (SEQ ID NO: 819) and the fusion construct FOPP was prepared as follows. The full-length Ra12 cDNA was obtained by PCR using pCRX1 as the template and the primers fo SEQ ID NO: 975 and 976. The PCR product was digested with restriction enzyme Nde I, and cloned into the Nde I site of the plasmid pCRX1FOPP, making the expression plasmid pRaFOPP. The nucleotide sequence of the insert was confirmed by DNA sequencing. To express the recombinant RaFOPP, the expression plasmid pRaFOPP was transformed into the E. coli strain BLR-pLysS. The transformant was shown to express RaFOPP protein upon induction with 1 mM IPTG. The identity of the recombinant protein was confirmed by Western blot with a rabbit antibody against P703P and by N-terminal sequencing of the expressed protein. The cDNA sequence for the fusion construct RaFOPP is provided in SEQ ID NO: 977, with the amino acid sequence being provided in SEQ ID NO: 978.

[1152] For large scale expression, the culture of the expression clone was inoculated into 25 ml STB containing 50 ug/ml kanamycin and 34 ug/ml chloramphenicol, and grown at 37° C. until OD600 was about 1.0 and stored at 4° C. overnight. Next day, the culture was diluted into 1 liter of STB containing 50 ug/ml kanamycin and 34 ug/ml chloramphenicol, and grown at 37° C. until the OD600 reached 0.4. IPTG was added to a final concentration of 1 mM, and the culture was incubated at 37° C. for 3 hours. The cells were pelleted by centrifugation at 5,000 RPM for 8 min and stored at −70° C. until purification. To purify the protein, the cell pellet was suspended in 25 ml of 10 mM Tris-Cl pH 8.0, 2 mM PMSF, a tablet of complete protease inhibitor (Boeringer) and 15 ug of lysozyme. The cells were lysed at 4° C. for 30 minutes, sonicated several times and the lysate was centrifuged for 30 minutes at 10,000× g. The precipitate containing the inclusion body was washed twice with 10 mM Tris-Cl pH 8.0 and 1% CHAPS. The inclusion body was solubalized in 40 ml of 10 mM Tris-Cl, pH 8.0, 100 mM sodium phosphate, and 8 M urea. The solution was bound to 8 ml of Ni-NTA resin (Qiagen) for one hour at room temperature. The mixture was then poured into a 25 ml column and the column was washed with 50 ml of 10 mM Tris-Cl pH 6.3, 100 mM sodium phosphate, 0.5% DOC and 8 M urea. The bound protein was eluted using 350 mM imidazole, 10 mM Tris-Cl pH 8.0, 100 mM sodium phosphate and 8 M urea. The fractions containing RaFOPP proteins were combined and dialyzed extensively against a large volume of 10 mM Tris-Cl pH 8.0, aliquoted and stored at -70° C.

[1153] Fusion constructs of P703P with the known prostate antigen PAP (referred to as FOPP2) and of the fusion protein FOPP with PAP (referred to as FOP3) are prepared as follows. The cDNA of the full-length human PAP is prepared from prostate cancer tissue using PCR. The FOPP2 cDNA is constructed by combining the coding sequence of amino acid residues 31 to 254 of P703P with the coding sequence for amino acid residues 33 to 386 of human PAP, with a coding sequence for a starting methionine and a 6× His Tag being added at the 5′ end of the cDNA. The FOP3 fusion construct is prepared by fusing the cDNA for FOPP (except the codons for the last two amino acid residues) with the coding sequence for amino acid residues 33 to 386 of human PAP, followed by a translation stop codon. These fusions are then expressed as recombinant proteins. The cDNA sequences for the fusion constructs FOPP2 and FOP3 are provided in SEQ ID NO: 979 and 980, respectively, with the corresponding amino acid sequences being provided in SEQ ID NO: 981 and 982, respectively.

### Example 22

### Real-Time PCR Characterization of the Prostate-Specific Antigen P501S in Peripheral Blood of Prostate Cancer Patients

[1154] Circulating epithelial cells were isolated from fresh blood of normal individuals and metastatic prostate cancer patients, mRNA isolated and cDNA prepared using real-time PCR procedures. Real-time PCR was performed with the Taqman™ procedure using both gene specific primers and probes to determine the levels of gene expression.

[1155] Epithelial cells were enriched from blood samples using an immunomagnetic bead separation method (Dynal A. S., Oslo, Norway). Isolated cells were lysed and the magnetic beads removed. The lysate was then processed for poly A+ mRNA isolation using magnetic beads coated with Oligo(dT)25. After washing the beads in buffer, bead/poly A+ RNA samples were suspended in 10 mM Tris HCl pH 8.0 and subjected to reversed transcription. The resulting cDNA was subjected to real-time PCR using gene specific primers. Beta-actin content was also determined and used for normalization. Samples with P501 copies greater than the mean of the normal samples+3 standard deviations were considered positive. Real time PCR on blood samples was performed using the Taqman™ procedure but extending to 50 cycles using forward and reverse primers and probes specific for P501S. Of the eight samples tested, 6 were positive for P501S and β-actin signal. The remaining 2 samples had no detectable β-actin or P501S. No P501S signal was observed in the four normal blood samples tested.

### Example 23

### Expression of the Prostate-Specific Antigens P703P AND P501S in SCID Mouse-Passaged Prostate Tumors

[1156] When considering the effectiveness of antigens in the treatment of prostate cancer, the continued presence of the antigens in tumors during androgen ablation therapy is important. The presence of the prostate-specific antigens P703P and P501S in prostate tumor samples grown in SCID mice in the presence of testosterone was evaluated as follows.

[1157] Two prostate tumors that had metastasized to the bone were removed from patients, implanted into SCID mice and grown in the presence of testosterone. Tumors were evaluated for mRNA expression of P703P, P501S and PSA using quantitative real time PCR with the SYBR green assay method. Expression of P703P and P501S in a prostate tumor was used as a positive control and the absence in normal intestine and normal heart as negative controls. In both cases, the specific mRNA was present in late passage tumors. Since the bone metastases were grown in the presence of testosterone, this implies that the presence of these genes would not be lost during androgen ablation therapy.

### Example 24

### Anti-P503S Monoclonal Antibody Inhibits Tumor Growth in Vivo

[1158] The ability of the anti-P503S monoclonal antibody 20D4 to suppress tumor formation in mice was examined as follows.

[1159] Ten SCID mice were injected subcutaneously with HEK293 cells that expressed P503S. Five mice received 150 micrograms of 20D4 intravenously at day 0 (time of tumor cell injection), day 5 and day 9. Tumor size was measured for 50 days. Of the five animals that received no 20D4, three formed detectable tumors after about 2 weeks which continued to enlarge throughout the study. In contrast, none of the five mice that received 20D4 formed tumors. These results demonstrate that the anti-P503S Mab 20D4 displays potent anti-tumor activity in vivo.

### Example 25

### Characterization of a T Cell Receptor Clone From a P501S-Specific T Cell Clone

[1160] T cells have a limited lifespan. However, cloning of T cell receptor (TCR) chains and subsequent transfer essentially enables infinite propagation of the T cell specificity. Cloning of tumor-antigen TCR chains allows the transfer of the specificity into T cells isolated from patients that share the TCR MHC-restricting allele. Such T cells could then be expanded and used in adoptive transfer settings to introduce the tumor antigen specificity into patients carrying tumors that express the antigen. T cell receptor alpha and beta chains from a CD8 T cell clone specific for the prostate-specific antigen P501S were isolated and sequenced as follows.

[1161] Total mRNA from 2×10⁶ cells from CTL clone 4E5 (described above in Example 12) was isolated using Trizol reagent and cDNA was synthesized. To determine Va and Vb sequences in this clone, a panel of Va and Vb subtype-specific primers was synthesized and used in RT-PCR reactions with cDNA generated from each of the clones. The RT-PCR reactions demonstrated that each of the clones expressed a common Vb sequence that corresponded to the Vb7 subfamily. Futhermore, using cDNA generated from the clone, the Va sequence expressed was determined to be Va6. To clone the full TCR alpha and beta chains from clone 4E5, primers were designed that spanned the initiator and terminator-coding TCR nucleotides. The primers were as follows: TCR Valpha-6 5′ (sense): GGATCC---GCCGCCACC—ATGTCACTTTCTAGCCTGCT (SEQ ID NO: 899) BamHI site Kozak TCR alpha sequence TCR alpha 3′ (antisense): GTCGAC---TCAGCTGGACCACAGCCGCAG (SEQ ID NO: 900) SalI site TCR alpha constant sequence TCR Vbeta-7. 5′ (sense): GGATCC---GCCGCCACC--ATGGGCTGCAGGCTGCTCT (SEQ ID NO: 901) BamHI site Kozak TCR alpha sequence TCR beta 3′ (antisense): GTCGAC---TCAGAAATCCTTTCTCTTGAC (SEQ ID NO: 902) SalI site TCR beta constant sequence. Standard 35 cycle RT-PCR reactions were established using cDNA synthesized from the CTL clone and the above primers, employing the proofreading thermostable polymerase PWO (Roche, Nutley, N.J.).

[1162] The resultant specific bands (approx. 850 bp for alpha and approx. 950 for beta) were ligated into the PCR blunt vector (Invitrogen) and transformed into E. coli. E. coli transformed with plasmids containing full-length alpha and beta chains were identified, and large scale preparations of the corresponding plasmids were generated. Plasmids containing full-length TCR alpha and beta chains were submitted for sequencing. The sequencing reactions demonstrated the cloning of full-length TCR alpha and beta chains with the determined cDNA sequences for the Vb and Va chains being shown in SEQ ID NO: 903 and 904, respectively. The corresponding amino acid sequences are shown in SEQ ID NO: 905 and 906, respectively. The Va sequence was shown by nucleotide sequence alignment to be 99% identical (347/348) to Va6.2, and the Vb to be 99% identical to Vb7 (336/338).

### Example 26

### Capture of Prostate Specific Cells Using the Prostate Antigen P503S

[1163] As described above, P503S is found on the surface of prostate cells. Secondary coated microsphere beads specific for mouse IgG were coupled with the purified P503S-specific monoclonal antibody 1D12. The bound P503S antibody was then used to capture HEK cells expressing recombinant P503S. This provides a model system for prostate-specific cell capture which may be usefully employed in the detection of prostate cells in blood, and therefore in the detection of prostate cancer.

[1164] P503S-transfected HEK cells were harvested and redissolved in wash buffer (PBS, 0.1% BSA, 0.6% sodium citrate) at an appropriate volume to give at least 5⁴ cells per sample. Round bottom Eppendorf tubes were used for all procedures involving beads. The stock concentrations were as shown below in Table VIII.

TABLE VIII

| Stock concentrations | Sample concentration | Amount needed |
|---|---|---|
| Epithelial enrich beads | 1⁷ beads/ml | 125 ul stock per |
| 4⁸ beads/ml | | 5 ml volume |
| (Dynal Biotech Inc. | | |
| Lake Success, NY) | | |
| 1D12 ascites antibody | 0.1 ug/ml (0.1X) to | 0.05 ul to 2.5 ul |
| 2 mg/ml | 5 ug/ml (5X) titrations | stock per sample |
| α-Mamma Mu 0.9 mg/ml | 1 ug/ml (1X) | 1.1 ul stock per |
| | | sample |
| Pan-mouse IgG beads | 1⁷ beads/ml | 125 ul stock per |
| 4⁸ beads/ml | | 5 ml volume |
| (Dynal Biotech) | | |

[1165] Blocked immunomagnetic beads were pre-washed as follows: all beads needed were pooled and washed once with 1 ml wash buffer. The beads were resuspended din a 3× volume of 1% BSA (v/v) in wash buffer and incubated for 15 min rotating at 4° C. The beads were then washed three times with 2× volume of wash buffer and resuspended to original volume. Non-blocked beads were pooled, washed three times with 2× volume of wash buffer and resuspended to original volume.

[1166] Primary antibody was incubated with secondary beads in a fresh Eppendorf for 30 minutes, rotating at 4° C. Approximately 200 ul wash buffer was added to increase the total volume for even mixing of the sample. The antibody-bead solution was transferred to a fresh Eppendorf, washed twice with an equal volume of wash buffer and resuspended to original volume. Target cells were added to each sample and incubated for 45 minutes, rotating at 4° C. The tubes were transferred to a magnet, the supernatant removed, taking care not the agitate the beads, and the samples were washed twice with 1 ml wash buffer. The samples were then ready for RT-PCR using a Dynabeads mRNA direct microkit (Dynal Biotech).

[1167] Epithelial cell enrichment was placed in a magnet and supernant was removed. The epithelial enrichment beads were then resuspendedin 100 ul lysis/binding buffer fortified with Rnasin (2 U/ul per sample), and sotred at -70° C. until use. Oligo (dT₂₅) Dynabeads were pre-washed as follows: all beads needed were pooled (23 ul/sample), washed three times with an excess volume of lysis/binding buffer, and resuspsended ot original volume. The lysis supernant was separated with a magnet and transferred to a fresh Eppendorf. 20 ul oligo (dT25) Dynabeads were added per samplem ad rolled for 5 min at room temperature. Supemant was separated using a magnet and discarded, leaving the mRNA annealed ot the beads. The bead/mRNA complex was washed with buffer and resuspended in cold Tris-HCl.

[1168] For RT-PCR, the Tris-HCl supernatant was separated and discarded using MPS. For each sample containing 1⁵ cells or less, the following was added to give a total volume of 30 ul: 14.25 ul H₂O; 1.5 ul BSA; 6 ul first strand buffer; 0.75 mL 10 mM dNTP mix; 3 ul Rnasin; 3 ul 0.1M dTT; and 1.5 ul Superscript II. The resulting solution was incubated for 1 hour at 42° C., diluted 1:5 in H₂O, heated at 80° C. for 2 min to detach cDNA from the beads, and immediately placed on MPS. The supernatant containing cDNA was transferred to a new tube and stored at −20° C.

[1169] Table IX shows the percentage of capture of P503S-transfected HEK cells as determined by RT-PCR.

TABLE IX

| | % capture P503S-transfected | % capture |
|---|---|---|
| | HEK cells | LnCap cells |
| 0.1 ug/ml P503S Mab | 36.90 | 0.00 |
| 0.5 ug/ml P503S Mab | 67.40 | 2.93 |
| 1 ug/ml P503S Mab | 40.22 | 0.00 |
| 5 ug/ml P503S Mab | 13.11 | 0.00 |
| Anti-Mu beads only, | 1.42 | 0.00 |
| non-blocked | | |
| Anti-Mu beads only, | 15.65 | 20.21 |
| blocked | | |
| Absolute control, | 100.00 | 100.00 |
| non-capture cells | | |

[1170] From the foregoing it will be appreciated that, although specific embodiments of the invention have been described herein for purposes of illustration, various modifications may be made without deviating from the spirit and scope of the invention. Accordingly, the invention is not limited except as by the appended claims.

What is claimed:

1. A fusion protein comprising at least one amino acid sequence selected from the group consisting of:
(a) sequences recited in SEQ ID NO: 112-114, 172, 176, 178, 327, 329, 331, 336, 339, 376-380, 383, 477-483, 496, 504, 505, 519, 520, 522, 525, 527, 532, 534, 537-551, 553-568, 573-586, 588-590, 592, 706-708, 775, 776, 778, 780, 781, 811, 814, 818, 826, 827, 853, 855, 858, 860-862, 866-877, 879, 883-893, 895, 897, 898, 909-915, 920-928, 932-934, 940, 941 and 943;
(b) immunogenic portions of a sequence recited in SEQ ID NO: 112-114, 172, 176, 178, 327, 329, 331, 336, 339, 376-380, 383, 477-483, 496, 504, 505, 519, 520, 522, 525, 527, 532, 534, 537-551, 553-568, 573-586, 588-590, 592, 706-708, 775, 776, 778, 780, 781, 811, 814, 818, 826, 827, 853, 855, 858, 860-862, 866-877, 879, 883-893, 895, 897, 898, 909-915, 920-928, 932-934, 940, 941 and 943;
(c) sequences having at least 70% identity to a sequence of SEQ ID NO: 112-114, 172, 176, 178, 327, 329, 331, 336, 339, 376-380, 383, 477-483, 496, 504, 505, 519, 520, 522, 525, 527, 532, 534, 537-551, 553-568, 573-586, 588-590, 592, 706-708, 775, 776, 778, 780, 781, 811, 814, 818, 826, 827, 853, 855, 858, 860-862, 866-877, 879, 883-893, 895, 897, 898, 909-915, 920-928, 932-934, 940, 941 and 943; and
(d) sequences having at least 90% identity to a sequence of SEQ ID NO: 112-114, 172, 176, 178, 327, 329, 331, 336, 339, 376-380, 383, 477-483, 496, 504, 505, 519, 520, 522, 525, 527, 532, 534, 537-551, 553-568, 573-586, 588-590, 592, 706-708, 775, 776, 778, 780, 781, 811, 814, 818, 826, 827, 853, 855, 858, 860-862, 866-877, 879, 883-893, 895, 897, 898, 909-915, 920-928, 932-934, 940, 941 and 943.

2. A fusion protein comprising at least one amino acid sequence encoded by a sequence selected from the group consisting of:
(a) sequences recited in SEQ ID NO: 1-111, 115-171, 173-175, 177, 179-305, 307-315, 326, 328, 330, 332-335, 340-375, 381, 382, 384-476, 524, 526, 530, 531, 533, 535, 536, 552, 569-572, 587, 591, 593-606, 618-705, 709-774, 777, 789, 817, 823, 824, 878, 880-882, 894, 896, 907, 908, 916-919, 929-931, 938 939 or 942;
(b) sequences having at least 70% identity to a sequence recited in SEQ ID NO: 1-111, 115-171, 173-175, 177, 179-305, 307-315, 326, 328, 330, 332-335, 340-375, 381, 382, 384-476, 524, 526, 530, 531, 533, 535, 536, 552, 569-572, 587, 591, 593-606, 618-705, 709-774, 777, 789, 817, 823, 824, 878, 880-882, 894, 896, 907, 908, 916-919, 929-931, 938, 939 or 942; and
(f) sequences having at least 90% identity to a sequence recited in SEQ ID NO: 1-111, 115-171, 173-175, 177, 179-305, 307-315, 326, 328, 330, 332-335, 340-375, 381, 382, 384-476, 524, 526, 530, 531, 533, 535, 536, 552, 569-572, 587, 591, 593-606, 618-705, 709-774, 777, 789, 817, 823, 824, 878, 880-882, 894. 896, 907, 908, 916-919, 929-931, 938, 939 or 942.

3. A fusion protein of any one of claims 1 and 2, further comprising at least an immunogenic portion of an amino acid sequence selected from the group consisting of SEQ ID NO: 944-946.

4. A fusion protein of claim 1, further comprising an amino acid sequence selected from the group consisting of SEQ ID NO: 944-946 and 948-972.

5. A fusion protein comprising an amino acid sequence selected from the group consisting of SEQ ID NO: 617, 947, 973, 974, 978, 981 and 982.

6. An isolated polynucleotide encoding a fusion protein of any one of claims 1 and 5.

7. An isolated polynucleotide according to claim 6, wherein the polynucleotide comprises a sequence selected from the group consisting of SEQ ID NO: 616, 977, 979 and 980.

8. An expression vector comprising a polynucleotide of claim 6 operably linked to an expression control sequence.

9. A host cell transformed or transfected with an expression vector according to claim 8.

10. A composition comprising a fusion protein according to any one of claims 1 and 5, and a physiologically acceptable carrier and immunostimulants.

11. A method for stimulating an immune response in a patient, comprising administering to the patient a composition of claim 10.

12. A method for the treatment of a cancer in a patient, comprising administering to the patient a composition of claim 10.

13. An isolated antibody, or antigen-binding fragment thereof, that specifically binds to a fusion protein of claim 1.

14. A method for detecting the presence of a cancer in a patient, comprising the steps of:
(a) obtaining a biological sample from the patient;
(b) contacting the biological sample with a binding agent that binds to a fusion protein of claim 1;
(c) detecting in the sample an amount of polypeptide that binds to the binding agent; and
(d) comparing the amount of polypeptide to a predetermined cut-off value and therefrom determining the presence of a cancer in the patient.

The application's sequence listing, which the Patent Office published only in electronic form, follows.

SEQUENCE LISTING (982 sequences)

SEQ ID NO: 1 - DNA, 814 bp, Homo sapien
  misc_feature (1)...(814): n = A,T,C or G
tttttttttttttttcacagtataacagctctttatttctgtgagttctactaggaaatcatcaaatctgagggttgtctggaggacttcaatacacctccccccatagtgaatcagcttccagggggtccagtccctctccttacttcatccccatcccatgccaaaggaagaccctccctccttggctcacagccttctctaggcttcccagtgcctccaggacagagtgggttatgttttcagctccatccttgctgtgagtgtctggtgcgttgtgcctccagcttctgctcagtgcttcatggacagtgtccagcacatgtcactctccactctctcagtgtggatccactagttctagagcggccgccaccgcggtggagctccagcttttgttccctttagtgagggttaattgcgcgcttggcgtaatcatggtcataactgtttcctgtgtgaaattgttatccgctcacaattccacacaacatacgagccggaagcataaagtgtaaagcctggggtgcctaatgagtganctaactcacattaattgcgttgcgctcactgnccgctttccagtcnggaaaactgtcgtgccagctgcattaatgaatcggccaacgcncggggaaaagcggtttgcgttttgggggctcttccgcttctcgctcactnantcctgcgctcggtcnttcggctgcggggaacggtatcactcctcaaaggnggtattacggttatccnnaaatcnggggatacccnggaaaaaantttaacaaaagggcancaaagggcngaaacgtaaaaa

SEQ ID NO: 2 - DNA, 816 bp, Homo sapien
  misc_feature (1)...(816): n = A,T,C or G
acagaaatgttggatggtggagcacctttctatacgacttacaggacagcagatggggaattcatggctgttggagcaatagaaccccagttctacgagctgctgatcaaaggacttggactaaagtctgatgaacttcccaatcagatgagcatggatgattggccagaaatgaagaagaagtttgcagatgtatttgcaaagaagacgaaggcagagtggtgtcaaatctttgacggcacagatgcctgtgtgactccggttctgacttttgaggaggttgttcatcatgatcacaacaaggaacggggctcgtttatcaccagtgaggagcaggacgtgagcccccgccctgcacctctgctgttaaacaccccagccatcccttctttcaaaagggatccactagttctagaagcggccgccaccgcggtggagctccagcttttgttccctttagtgagggttaattgcgcgcttggcgtaatcatggtcatagctgtttcctgtgtgaaattgttatccgctcacaattcccccaacatacgagccggaacataaagtgttaagcctggggtgcctaatgantgagctaactcncattaattgcgttgcgctcactgcccgctttccagtcgggaaaactgtcgtgccactgcnttantgaatcngccaccccccgggaaaaggcggttgcnttttgggcctcttccgctttcctcgctcattgatcctngcncccggtcttcggctgcggngaacggttcactcctcaaaggcggtntnccggttatccccaaacnggggatacccnga

SEQ ID NO: 3 - DNA, 773 bp, Homo sapien
  misc_feature (1)...(773): n = A,T,C or G
cttttgaaagaagggatggctggggtgtttaacagcagaggtgcagggcgggggctcacgtcctgctcctcactggtgataaacgagccccgttccttgttgtgatcatgatgaacaacctcctcaaaagtcagaaccggagtcacacaggcatctgtgccgtcaaagatttgacaccactctgccttcgtcttctttgcaaatacatctgcaaacttcttcttcatttctggccaatcatccatgctcatctgattgggaagttcatcagactttagtccanntcctttgatcagcagctcgtagaactggggttctattgctccaacagccatgaattccccatctgctgtcctgtaagtcgtatagaaaggtgctccaccatccaacatgttctgtcctcgagggggggcccggtacccaattcgccctatantgagtcgtattacgcgcgctcactggccgtcgttttacaacgtcgtgactgggaaaaccctgggcgttaccaacttaatcgccttgcagcacatccccctttcgccagctgggcgtaatancgaaaaggcccgcaccgatcgcccttccaacagttgcgcacctgaatgggnaaatgggacccccctgttaccgcgcattnaacccccgcngggtttngttgttacccccacntnnaccgcttacactttgccagcgccttancgcccgctccctttcncctttcttcccttcctttcncnccnctttcccccggggtttcccccntcaaaccccna

SEQ ID NO: 4 - DNA, 828 bp, Homo sapien
  misc_feature (1)...(828): n = A,T,C or G
cctcctgagtcctactgacctgtgctttctggtgtggagtccagggctgctaggaaaaggaatgggcagacacaggtgtatgccaatgtttctgaaatgggtataatttcgtcctctccttcggaacactggctgtctctgaagacttctcgctcagtttcagtgaggacacacacaaagacgtgggtgaccatgttgtttgtggggtgcagagatgggaggggtggggcccaccctggaagagtggacagtgacacaaggtggacactctctacagatcactgaggataagctggagccacaatgcatgaggcacacacacagcaaggatgacnctgtaaacatagcccacgctgtcctgngggcactgggaagcctanatnaggccgtgagcanaaagaaggggaggatccactagttctanagcggccgccaccgcggtgganctccancttttgttccctttagtgagggttaattgcgcgcttggcntaatcatggtcatanctntttcctgtgtgaaattgttatccgctcacaattccacacaacatacganccggaaacataaantgtaaacctggggtgcctaatgantgactaactcacattaattgcgttgcgctcactgcccgctttccaatcnggaaacctgtcttgccncttgcattnatgaatcngccaacccccggggaaaagcgtttgcgttttgggcgctcttccgcttcctcnctcanttantccctncnctcggtcattccggctgcngcaaaccggttcaccncctccaaagggggtattccggtttccccnaatccgggganancc

SEQ ID NO: 5 - DNA, 834 bp, Homo sapien
  misc_feature (1)...(834): n = A,T,C or G
tttttttttttttttactgatagatggaatttattaagcttttcacatgtgatagcacatagttttaattgcatccaaagtactaacaaaaactctagcaatcaagaatggcagcatgttattttataacaatcaacacctgtggcttttaaaatttggttttcataagataatttatactgaagtaaatctagccatgcttttaaaaaatgctttaggtcactccaagcttggcagttaacatttggcataaacaataataaaacaatcacaatttaataaataacaaatacaacattgtaggccataatcatatacagtataaggaaaaggtggtagtgttgagtaagcagttattagaatagaataccttggcctctatgcaaatatgtctagacactttgattcactcagccctgacattcagttttcaaagtaggagacaggttctacagtatcattttacagtttccaacacattgaaaacaagtagaaaatgatgagttgatttttattaatgcattacatcctcaagagttatcaccaacccctcagttataaaaaattttcaagttatattagtcatataacttggtgtgcttattttaaattagtgctaaatggattaagtgaagacaacaatggtcccctaatgtgattgatattggtcatttttaccagcttctaaatctnaactttcaggcttttgaactggaacattgnatnacagtgttccanagttncaacctactggaacattacagtgtgcttgattcaaaatgttattttgttaaaaattaaattttaacctggtggaaaaataatttgaaatna

SEQ ID NO: 6 - DNA, 818 bp, Homo sapien
  misc_feature (1)...(818): n = A,T,C or G
ttttttttttttttttttttaagaccctcatcaatagatggagacatacagaaatagtcaaaccacatctacaaaatgccagtatcaggcggcggcttcgaagccaaagtgatgtttggatgtaaagtgaaatattagttggcggatgaagcagatagtgaggaaagttgagccaataatgacgtgaagtccgtggaagcctgtggctacaaaaaatgttgagccgtagatgccgtcggaaatggtgaagggagactcgaagtactctgaggcttgtaggagggtaaaatagagacccagtaaaattgtaataagcagtgcttgaattatttggtttcggttgttttctattagactatggtgagctcaggtgattgatactcctgatgcgagtaatacggatgtgtttaggagtgggacttctaggggatttagcggggtgatgcctgttgggggccagtgccctcctagttggggggtaggggctaggctggagtggtaaaaggctcagaaaaatcctgcgaagaaaaaaacttctgaggtaataaataggattatcccgtatcgaaggcctttttggacaggtggtgtgtggtggccttggtatgtgctttctcgtgttacatcgcgccatcattggtatatggttagtgtgttgggttantanggcctantatgaagaacttttggantggaattaaatcaatngcttggccggaagtcattanganggctnaaaaggccctgttangggtctgggctnggttttacccnacccatggaatncnccccccggacnantgnatccctattcttaa

SEQ ID NO: 7 - DNA, 817 bp, Homo sapien
  misc_feature (1)...(817): n = A,T,C or G
tttttttttttttttttttttggctctagagggggtagagggggtgctatagggtaaatacgggccctatttcaaagatttttaggggaattaattctaggacgatgggtatgaaactgtggtttgctccacagatttcagagcattgaccgtagtatacccccggtcgtgtagcggtgaaagtggtttggtttagacgtccgggaattgcatctgtttttaagcctaatgtggggacagctcatgagtgcaagacgtcttgtgatgtaattattatacnaatgggggcttcaatcgggagtactactcgattgtcaacgtcaaggagtcgcaggtcgcctggttctaggaataatgggggaagtatgtaggaattgaagattaatccgccgtagtcggtgttctcctaggttcaataccattggtggccaattgatttgatggtaaggggagggatcgttgaactcgtctgttatgtaaaggatnccttngggatgggaaggcnatnaaggactanggatnaatggcgggcangatatttcaaacngtctctanttcctgaaacgtctgaaatgttaataanaattaantttngttattgaatnttnnggaaaagggcttacaggactagaaaccaaatangaaaantaatnntaanggcnttatcntnaaaggtnataaccnctcctatnatcccacccaatngnattccccacncnnacnattggatnccccanttccanaaanggccnccccccggtgnannccnccttttgttcccttnantganggttattcncccctngcnttatcancc

SEQ ID NO: 8 - DNA, 799 bp, Homo sapien
  misc_feature (1)...(799): n = A,T,C or G
catttccgggtttactttctaaggaaagccgagcggaagctgctaacgtgggaatcggtgcataaggagaactttctgctggcacgcgctagggacaagcgggagagcgactccgagcgtctgaagcgcacgtcccagaaggtggacttggcactgaaacagctgggacacatccgcgagtacgaacagcgcctgaaagtgctggagcgggaggtccagcagtgtagccgcgtcctggggtgggtggccgangcctganccgctctgccttgctgcccccangtgggccgccaccccctgacctgcctgggtccaaacactgagccctgctggcggacttcaagganaacccccacanggggattttgctcctanantaaggctcatctgggcctcggcccccccacctggttggccttgtctttgangtgagccccatgtccatctgggccactgtcnggaccacctttngggagtgttctccttacaaccacannatgcccggctcctcccggaaaccantcccancctgngaaggatcaagncctgnatccactnntnctanaaccggccnccnccgcngtggaacccnccttntgttccttttcnttnagggttaatnncgccttggccttnccanngtcctncncnttttccnntgttnaaattgttangcncccnccnntcccncnncnncnancccgacccnnannttnnannncctgggggtnccnncngattgacccnnccnccctntanttgcnttngggnncnntgcccctttccctctnggganncg

SEQ ID NO: 9 - DNA, 801 bp, Homo sapien
  misc_feature (1)...(801): n = A,T,C or G
acgccttgatcctcccaggctgggactggttctgggaggagccgggcatgctgtggtttgtaangatgacactcccaaaggtggtcctgacagtggcccagatggacatggggctcacctcaaggacaaggccaccaggtgcgggggccgaagcccacatgatccttactctatgagcaaaatcccctgtgggggcttctccttgaagtccgccancagggctcagtctttggacccangcaggtcatggggttgtngnccaactgggggccncaacgcaaaanggcncagggcctcngncacccatcccangacgcggctacactnctggacctcccnctccaccactttcatgcgctgttcntacccgcgnatntgtcccanctgtttcngtgccnactccancttctnggacgtgcgctacatacgcccggantcncnctcccgctttgtccctatccacgtnccancaacaaatttcnccntantgcaccnattcccacntttnncagntttccncnncgngcttccttntaaaagggttganccccggaaaatnccccaaagggggggggccnggtacccaactnccccctnatagctgaantccccatnaccnngnctcnatgganccntccnttttaannacnttctnaacttgggaananccctcgnccntncccccnttaatcccnccttgcnangnncntcccccnntccncccnnntnggcntntnanncnaaaaaggcccnnnancaatctcctnncncctcanttcgccanccctcgaaatcggccnc

SEQ ID NO: 10 - DNA, 789 bp, Homo sapien
  misc_feature (1)...(789): n = A,T,C or G
cagtctatntggccagtgtggcagctttccctgtggctgccggtgccacatgcctgtcccacagtgtggccgtggtgacagcttcagccgccctcaccgggttcaccttctcagccctgcagatcctgccctacacactggcctccctctaccaccgggagaagcaggtgttcctgcccaaataccgaggggacactggaggtgctagcagtgaggacagcctgatgaccagcttcctgccaggccctaagcctggagctcccttccctaatggacacgtgggtgctggaggcagtggcctgctcccacctccacccgcgctctgcggggcctctgcctgtgatgtctccgtacgtgtggtggtgggtgagcccaccgangccagggtggttccgggccggggcatctgcctggacctcgccatcctggatagtgcttcctgctgtcccangtggccccatccctgtttatgggctccattgtccagctcagccagtctgtcactgcctatatggtgtctgccgcaggcctgggtctggtcccatttactttgctacacaggtantatttgacaagaacganttggccaaatactcagcgttaaaaaattccagcaacattgggggtggaaggcctgcctcactgggtccaactccccgctcctgttaaccccatggggctgccggcttggccgccaatttctgttgctgccaaantnatgtggctctctgctgccacctgttgctggctgaagtgcntacngcncanctnggggggtngggngttccc

SEQ ID NO: 11 - DNA, 772 bp, Homo sapien
  misc_feature (1)...(772): n = A,T,C or G
cccaccctacccaaatattagacaccaacacagaaaagctagcaatggattcccttctactttgttaaataaataagttaaatatttaaatgcctgtgtctctgtgatggcaacagaaggaccaacaggccacatcctgataaaaggtaagaggggggtggatcagcaaaaagacagtgctgtgggctgaggggacctggttcttgtgtgttgcccctcaggactcttcccctacaaataactttcatatgttcaaatcccatggaggagtgtttcatcctagaaactcccatgcaagagctacattaaacgaagctgcaggttaaggggcttanagatgggaaaccaggtgactgagtttattcagctcccaaaaacccttctctaggtgtgtctcaactaggaggctagctgttaaccctgagcctgggtaatccacctgcagagtccccgcattccagtgcatggaacccttctggcctccctgtataagtccagactgaaacccccttggaaggnctccagtcaggcagccctanaaactggggaaaaaagaaaaggacgccccancccccagctgtgcanctacgcacctcaacagcacagggtggcagcaaaaaaaccactttactttggcacaaacaaaaactngggggggcaaccccggcaccccnangggggttaacaggaancngggnaacntggaacccaattnaggcaggcccnccaccccnaatnttgctgggaaatttttcctcccctaaattntttc

SEQ ID NO: 12 - DNA, 751 bp, Homo sapien
  misc_feature (1)...(751): n = A,T,C or G
gccccaattccagctgccacaccacccacggtgactgcattagttcggatgtcatacaaaagctgattgaagcaaccctctactttttggtcgtgagccttttgcttggtgcaggtttcattggctgtgttggtgacgttgtcattgcaacagaatgggggaaaggcactgttctctttgaagtanggtgagtcctcaaaatccgtatagttggtgaagccacagcacttgagccctttcatggtggtgttccacacttgagtgaagtcttcctgggaaccataatctttcttgatggcaggcactaccagcaacgtcagggaagtgctcagccattgtggtgtacaccaaggcgaccacagcagctgcnacctcagcaatgaagatgangaggangatgaagaagaacgtcncgagggcacacttgctctcagtcttancaccatancagcccntgaaaaccaanancaaagaccacnacnccggctgcgatgaagaaatnaccccncgttgacaaacttgcatggcactggganccacagtggcccnaaaaatcttcaaaaaggatgccccatcnattgaccccccaaatgcccactgccaacaggggctgccccacncncnnaacgatganccnattgnacaagatctncntggtcttnatnaacntgaaccctgcntngtggctcctgttcaggnccnnggcctgacttctnaannaangaactcngaagnccccacnggananncg

SEQ ID NO: 13 - DNA, 729 bp, Homo sapien
  misc_feature (1)...(729): n = A,T,C or G
gagccaggcgtccctctgcctgcccactcagtggcaacacccgggagctgttttgtcctttgtggancctcagcagtnccctctttcagaactcantgccaaganccctgaacaggagccaccatgcagtgcttcagcttcattaagaccatgatgatcctcttcaatttgctcatctttctgtgtggtgcagccctgttggcagtgggcatctgggtgtcaatcgatggggcatcctttctgaagatcttcgggccactgtcgtccagtgccatgcagtttgtcaacgtgggctacttcctcatcgcagccggcgttgtggtcttagctctaggtttcctgggctgctatggtgctaagactgagagcaagtgtgccctcgtgacgttcttcttcatcctcctcctcatcttcattgctgaggttgcaatgctgtggtcgccttggtgtacaccacaatggctgagcacttcctgacgttgctggtaatgcctgccatcaanaaaagattatgggttcccaggaanacttcactcaagtgttggaacaccaccatgaaagggctcaagtgctgtggcttcnnccaactatacggattttgaagantcacctacttcaaagaaaanagtgcctttcccccatttctgttgcaattgacaaacgtccccaacacagccaattgaaaacctgcacccaacccaaangggtccccaaccanaaattnaaggg

SEQ ID NO: 14 - DNA, 816 bp, Homo sapien
  misc_feature (1)...(816): n = A,T,C or G
tgctcttcctcaaagttgttcttgttgccataacaaccaccataggtaaagcgggcgcagtgttcgctgaaggggttgtagtaccagcgcgggatgctctccttgcagagtcctgtgtctggcaggtccacgcagtgccctttgtcactggggaaatggatgcgctggagctcgtcaaagccactcgtgtatttttcacaggcagcctcgtccgacgcgtcggggcagttgggggtgtcttcacactccaggaaactgtcnatgcagcagccattgctgcagcggaactgggtgggctgacangtgccagagcacactggatggcgcctttccatgnnangggccctgngggaaagtccctganccccananctgcctctcaaangccccaccttgcacaccccgacaggctagaatggaatcttcttcccgaaaggtagttnttcttgttgcccaanccanccccntaaacaaactcttgcanatctgctccgngggggtcntantaccancgtgggaaaagaaccccaggcngcgaaccaancttgtttggatncgaagcnataatctnctnttctgcttggtggacagcaccantnactgtnnanctttagnccntggtcctcntgggttgnncttgaacctaatcnccnntcaactgggacaaggtaantngccntcctttnaattcccnancntnccccctggtttggggttttncncnctcctaccccagaaannccgtgttcccccccaactaggggccnaaaccnnttnttccacaaccctnccccacccacgggttcngntggttng

SEQ ID NO: 15 - DNA, 783 bp, Homo sapien
  misc_feature (1)...(783): n = A,T,C or G
ccaaggcctgggcaggcatanacttgaaggtacaaccccaggaacccctggtgctgaaggatgtggaaaacacagattggcgcctactgcggggtgacacggatgtcagggtagagaggaaagacccaaaccaggtggaactgtggggactcaaggaangcacctacctgttccagctgacagtgactagctcagaccacccagaggacacggccaacgtcacagtcactgtgctgtccaccaagcagacagaagactactgcctcgcatccaacaangtgggtcgctgccggggctctttcccacgctggtactatgaccccacggagcagatctgcaagagtttcgtttatggaggctgcttgggcaacaagaacaactaccttcgggaagaagagtgcattctancctgtcngggtgtgcaaggtgggcctttganangcanctctggggctcangcgactttcccccagggcccctccatggaaaggcgccatccantgttctctggcacctgtcagcccacccagttccgctgcancaatggctgctgcatcnacantttcctngaattgtgacaacaccccccantgcccccaaccctcccaacaaagcttccctgttnaaaaatacnccanttggcttttnacaaacncccggcncctccnttttccccnntnaacaaagggcnctngcntttgaactgcccnaacccnggaatctnccnnggaaaaantnccccccctggttcctnnaancccctccncnaaanctncccccccc

SEQ ID NO: 16 - DNA, 801 bp, Homo sapien
  misc_feature (1)...(801): n = A,T,C or G
gccccaattccagctgccacaccacccacggtgactgcattagttcggatgtcatacaaaagctgattgaagcaaccctctactttttggtcgtgagccttttgcttggtgcaggtttcattggctgtgttggtgacgttgtcattgcaacagaatgggggaaaggcactgttctctttgaagtagggtgagtcctcaaaatccgtatagttggtgaagccacagcacttgagccctttcatggtggtgttccacacttgagtgaagtcttcctgggaaccataatctttcttgatggcaggcactaccagcaacgtcaggaagtgctcagccattgtggtgtacaccaaggcgaccacagcagctgcaacctcagcaatgaagatgaggaggaggatgaagaagaacgtcncgagggcacacttgctctccgtcttagcaccatagcagcccangaaaccaagagcaaagaccacaacgccngctgcgaatgaaagaaantacccacgttgacaaactgcatggccactggacgacagttggcccgaanatcttcagaaaagggatgccccatcgattgaacacccanatgcccactgccnacagggctgcnccncncngaaagaatgagccattgaagaaggatcntcntggtcttaatgaactgaaaccntgcatggtggcccctgttcagggctcttggcagtgaattctganaaaaaggaacngcntnagcccccccaaanganaaaacacccccgggtgttgccctgaattggcggccaagganccctgccccng

SEQ ID NO: 17 - DNA, 740 bp, Homo sapien
  misc_feature (1)...(740): n = A,T,C or G
gtgagagccaggcgtccctctgcctgcccactcagtggcaacacccgggagctgttttgtcctttgtggagcctcagcagttccctctttcagaactcactgccaagagccctgaacaggagccaccatgcagtgcttcagcttcattaagaccatgatgatcctcttcaatttgctcatctttctgtgtggtgcagccctgttggcagtgggcatctgggtgtcaatcgatggggcatcctttctgaagatcttcgggccactgtcgtccagtgccatgcagtttgtcaacgtgggctacttcctcatcgcagccggcgttgtggtctttgctcttggtttcctgggctgctatggtgctaagacggagagcaagtgtgccctcgtgacgttcttcttcatcctcctcctcatcttcattgctgaagttgcagctgctgtggtcgccttggtgtacaccacaatggctgaaccattcctgacgttgctggtantgcctgccatcaanaaagattatgggttcccaggaaaaattcactcaantntggaacaccnccatgaaaagggctccaatttctgntggcttccccaactataccggaattttgaaagantcnccctacttccaaaaaaaaananttgcctttncccccnttctgttgcaatgaaaacntcccaanacngccaatnaaaacctgcccnnncaaaaaggntcncaaacaaaaaaantnnaagggttn

SEQ ID NO: 18 - DNA, 802 bp, Homo sapien
  misc_feature (1)...(802): n = A,T,C or G
ccgctggttgcgctggtccagngnagccacgaagcacgtcagcatacacagcctcaatcacaaggtcttccagctgccgcacattacgcagggcaagagcctccagcaacactgcatatgggatacactttactttagcagccagggtgacaactgagaggtgtcgaagcttattcttctgagcctctgttagtggaggaagattccgggcttcagctaagtagtcagcgtatgtcccataagcaaacactgtgagcagccggaaggtagaggcaaagtcactctcagccagctctctaacattgggcatgtccagcagttctccaaacacgtagacaccagnggcctccagcacctgatggatgagtgtggccagcgctgcccccttggccgacttggctaggagcagaaattgctcctggttctgccctgtcaccttcacttccgcactcatcactgcactgagtgtgggggacttgggctcaggatgtccagagacgtggttccgccccctcncttaatgacaccgnccanncaaccgtcggctcccgccgantgngttcgtcgtncctgggtcagggtctgctggccnctacttgcaancttcgtcnggcccatggaattcaccncaccggaactngtangatccactnnttctataaccggncgccaccgcnnntggaactccactcttnttncctttacttgagggttaaggtcacccttnncgttaccttggtccaaaccntnccntgtgtcganatngtnaatcnggnccnatnccanccncatangaagccng

SEQ ID NO: 19 - DNA, 731 bp, Homo sapien
  misc_feature (1)...(731): n = A,T,C or G
cnaagcttccaggtnacgggccgcnaancctgacccnaggtancanaangcagncngcgggagcccaccgtcacgnggnggngtctttatnggagggggcggagccacatcnctggacntcntgaccccaactccccnccncncantgcagtgatgagtgcagaactgaaggtnacgtggcaggaaccaagancaaannctgctccnntccaagtcggcnnagggggcggggctggccacgcncatccntcnagtgctgnaaagccccnncctgtctacttgtttggagaacngcnnngacatgcccagngttanataacnggcngagagtnantttgcctctcccttccggctgcgcancgngtntgcttagnggacataacctgactacttaactgaacccnngaatctnccncccctccactaagctcagaacaaaaaacttcgacaccactcanttgtcacctgnctgctcaagtaaagtgtaccccatncccaatgtntgctngangctctgncctgcnttangttcggtcctgggaagacctatcaattnaagctatgtttctgactgcctcttgctccctgnaacaancnacccnncnntccaagggggggncggcccccaatccccccaaccntnaattnantttanccccncccccnggcccggccttttacnancntcnnnnacngggnaaaaccnnngctttncccaacnnaatccncct

SEQ ID NO: 20 - DNA, 754 bp, Homo sapien
  misc_feature (1)...(754): n = A,T,C or G
tttttttttttttttttttttaaaaaccccctccattnaatgnaaacttccgaaattgtccaaccccctcntccaaatnnccntttccgggngggggttccaaacccaanttanntttggannttaaattaaatnttnnttggnggnnnaanccnaatgtnangaaagttnaacccantatnancttnaatncctggaaaccngtngnttccaaaaatntttaacccttaantccctccgaaatngttnanggaaaacccaanttctcntaaggttgtttgaaggntnaatnaaaancccnnccaattgtttttngccacgcctgaattaattggnttccgntgttttccnttaaaanaaggnnanccccggttantnaatccccccnnccccaattataccgantttttttngaattgggancccncgggaattaacggggnnnntccctnttggggggcnggnnccccccccntcgggggttngggncaggncnnaattgtttaagggtccgaaaaatccctccnagaaaaaaanctcccaggntgagnntngggtttnccccccccccanggcccctctcgnanagttggggtttggggggcctgggattttntttcccctnttncctcccccccccccnggganagaggttngngttttgntcnncggccccnccnaaganctttnccganttnanttaaatccntgcctnggcgaagtccnttgnagggntaaanggccccctnncggg

SEQ ID NO: 21 - DNA, 755 bp, Homo sapien
  misc_feature (1)...(755): n = A,T,C or G
atcancccatgaccccnaacnngggaccnctcanccggncnnncnaccnccggccnatcanngtnagnncactncnnttnnatcacnccccnccnactacgcccncnanccnacgcnctanncanatnccactganngcgcgangtnganngagaaanctnataccanagncaccanacnccagctgtccnanaangcctnnnatacnggnnnatccaatntgnancctccnaagtattnnncnncanatgattttcctnanccgattacccntnccccctancccctcccccccaacnacgaaggcnctggnccnaaggnngcgncnccccgctagntccccnncaagtcncncncctaaactcanccnnattacncgcttcntgagtatcactccccgaatctcaccctactcaactcaaaaanatcngatacaaaataatncaagcctgnttatnacactntgactgggtctctattttagnggtccntnaancntcctaatacttccagtctnccttcnccaatttccnaanggctctttcngacagcatnttttggttcccnnttgggttcttanngaattgcccttcntngaacgggctcntcttttccttcggttancctggnttcnnccggccagttattatttcccnttttaaattcntnccntttanttttggcnttcnaaacccccggccttgaaaacggccccctggtaaaaggttgttttganaaaatttttgttttgttcc

SEQ ID NO: 22 - DNA, 849 bp, Homo sapien
  misc_feature (1)...(849): n = A,T,C or G
tttttttttttttttangtgtngtcgtgcaggtagaggcttactacaantgtgaanacgtacgctnggantaangcgacccganttctagganncnccctaaaatcanactgtgaagatnatcctgnnnacggaanggtcaccggnngatnntgctagggtgnccnctcccannncnttncataactcngnggccctgcccaccaccttcggcggcccngngnccgggcccgggtcattngnnttaaccncactnngcnancggtttccnnccccnncngacccnggcgatccggggtnctctgtcttcccctgnagncnanaaantgggccncggncccctttacccctnnacaagccacngccntctanccncngccccccctccantnngggggactgccnanngctccgttnctngnnaccccnnngggtncctcggttgtcgantcnaccgnangccanggattccnaaggaaggtgcgttnttggcccctacccttcgctncggnncacccttcccgacnanganccgctcccgcncnncgnngcctcncctcgcaacacccgcnctcntcngtncggnnncccccccacccgcnccctcncncngncgnancnctccnccnccgtctcanncaccaccccgccccgccaggccntcanccacnggnngacnngnagcncnntcgcnccgcgcngcgncnccctcgccncngaactncntcnggccantnncgctcaanccnnacnaaacgccgctgcgcggcccgnagcgnccncctccncgagtcctcccgncttccnacccangnnttccncgaggacacnnnaccccgccnncangcgg

SEQ ID NO: 23 - DNA, 872 bp, Homo sapien
  misc_feature (1)...(872): n = A,T,C or G
gcgcaaactatacttcgctcgnactcgtgcgcctcgctnctcttttcctccgcaaccatgtctgacnancccgattnggcngatatcnanaagntcgancagtccaaactgantaacacacacacncnanaganaaatccnctgccttccanagtanacnattgaacnngagaaccangcnggcgaatcgtaatnaggcgtgcgccgccaatntgtcnccgtttattntnccagcntcncctnccnaccctacntcttcnnagctgtcnnacccctngtncgnaccccccnaggtcgggatcgggtttnnnntgaccgngcnncccctccccccntccatnacganccncccgcaccaccnanngcncgcnccccgnnctcttcgccnccctgtcctntncccctgtngcctggcncngnaccgcattgaccctcgccnnctncnngaaancgnanacgtccgggttgnnannancgctgtgggnnngcgtctgcnccgcgttccttccnncnncttccaccatcttcnttacngggtctccncgccntctcnnncacnccctgggacgctntcctntgccccccttnactcccccccttcgncgtgncccgnccccaccntcatttncanacgntcttcacaannncctggntnnctcccnancngncngtcanccnagggaagggnggggnnccnntgnttgacgttgnggngangtccgaanantcctcnccntcancnctacccctcgggcgnnctctcngttnccaacttancaantctcccccgngngcncntctcagcctcncccnccccnctctctgcantgtnctctgctctnaccnntacgantnttcgncnccctctttcc

SEQ ID NO: 24 - DNA, 815 bp, Homo sapien
  misc_feature (1)...(815): n = A,T,C or G
gcatgcaagcttgagtattctatagngtcacctaaatancttggcntaatcatggtcntanctgncttcctgtgtcaaatgtatacnaantanatatgaatctnatntgacaaganngtatcntncattagtaacaantgtnntgtccatcctgtcngancanattcccatnnattncgncgcattcncngcncantatntaatngggaantcnnntnnnncaccnncatctatcntnccgcnccctgactggnagagatggatnanttctnntntgaccnacatgttcatcttggattnaananccccccgcngnccaccggttngnngcnagccnntcccaagacctcctgtggaggtaacctgcgtcaganncatcaaacntgggaaacccgcnnccangtnnaagtngnnncanangatcccgtccaggnttnaccatcccttcncagcgccccctttngtgccttanagngnagcgtgtccnanccnctcaacatganacgcgccagnccanccgcaattnggcacaatgtcgncgaaccccctagggggantnatncaaanccccaggattgtccncncangaaatcccncanccccnccctacccnnctttgggacngtgaccaantcccggagtnccagtccggccngnctcccccaccggtnnccntgggggggtgaanctcngnntcanccngncgaggnntcgnaaggaaccggncctnggncgaanngancnntcngaagngccncntcgtataaccccccctcnccanccnacngntagntcccccccngggtncggaangg

SEQ ID NO: 25 - DNA, 775 bp, Homo sapien
  misc_feature (1)...(775): n = A,T,C or G
ccgagatgtctcgctccgtggccttagctgtgctcgcgctactctctctttctggcctggaggctatccagcgtactccaaagattcaggtttactcacgtcatccagcagagaatggaaagtcaaatttcctgaattgctatgtgtctgggtttcatccatccgacattgaanttgacttactgaagaatgganagagaattgaaaaagtggagcattcagacttgtctttcagcaaggactggtctttctatctcntgtactacactgaattcacccccactgaaaaagatgagtatgcctgccgtgtgaaccatgtgactttgtcacagcccaagatagttaagtgggatcgagacatgtaagcagncnncatggaagtttgaagatgccgcatttggattggatgaattccaaattctgcttgcttgcnttttaatantgatatgcntatacaccctaccctttatgnccccaaattgtaggggttacatnantgttcncntnggacatgatcttcctttataantccnccnttcgaattgcccgtcncccngttnngaatgtttccnnaaccacggttggctcccccaggtcncctcttacggaagggcctgggccnctttncaaggttgggggaaccnaaaatttcncttntgcccncccnccacnntcttgngnncncantttggaacccttccnattccccttggcctcnnanccttnnctaanaaaacttnaaancgtngcnaaanntttnacttccccccttacc

SEQ ID NO: 26 - DNA, 820 bp, Homo sapien
  misc_feature (1)...(820): n = A,T,C or G
anattantacagtgtaatcttttcccagaggtgtgtanagggaacggggcctagaggcatcccanagatancttatancaacagtgctttgaccaagagctgctgggcacatttcctgcagaaaaggtggcggtccccatcactcctcctctcccatagccatcccagaggggtgagtagccatcangccttcggtgggagggagtcanggaaacaacanaccacagagcanacagaccantgatgaccatgggcgggagcgagcctcttccctgnaccggggtggcananganagcctanctgaggggtcacactataaacgttaacgaccnagatnancacctgcttcaagtgcacccttcctacctgacnaccagngaccnnnaactgcngcctggggacagcnctgggancagctaacnnagcactcacctgcccccccatggccgtncgcntccctggtcctgncaagggaagctccctgttggaattncgggganaccaaggganccccctcctccanctgtgaaggaaaaanngatggaattttncccttccggccnntcccctcttcctttacacgccccctnntactcntctccctctnttntcctgncncacttttnaccccnnnatttcccttnattgatcggannctnganattccactnncgcctnccntcnatcngnaanacnaaanactntctnacccnggggatgggnncctcgntcatcctctctttttcnctaccnccnnttctttgcctctccttngatcatccaaccntcgntggccntncccccccnnntcctttnccc

SEQ ID NO: 27 - DNA, 818 bp, Homo sapien
  misc_feature (1)...(818): n = A,T,C or G
tctgggtgatggcctcttcctcctcagggacctctgactgctctgggccaaagaatctcttgtttcttctccgagccccaggcagcggtgattcagccctgcccaacctgattctgatgactgcggatgctgtgacggacccaaggggcaaatagggtcccagggtccagggaggggcgcctgctgagcacttccgcccctcaccctgcccagcccctgccatgagctctgggctgggtctccgcctccagggttctgctcttccangcangccancaagtggcgctgggccacactggcttcttcctgccccntccctggctctgantctctgtcttcctgtcctgtgcangcnccttggatctcagtttccctcnctcanngaactctgtttctganntcttcanttaactntgantttatnaccnantggnctgtnctgtcnnactttaatgggccngaccggctaatccctccctcnctcccttccanttcnnnnaaccngcttnccntcntctccccntancccgccngggaancctcctttgccctnaccangggccnnnaccgcccntnnctnggggggcnnggtnnctncncctgntnnccccnctcncnnttncctcgtcccnncnncgcnnngcannttcncngtcccnntnnctcttcnngtntcgnaangntcncntntnnnnngncnngntnntncntccctctcnccnnntgnangtnnttnnnncncngnnccccnnnncnnnnnnggnnntnnntctncncngccccnncccccngnattaaggcctccnntctccggccnc

SEQ ID NO: 28 - DNA, 731 bp, Homo sapien
  misc_feature (1)...(731): n = A,T,C or G
aggaagggcggagggatattgtangggattgagggataggagnataangggggaggtgtgtcccaacatganggtgnngttctcttttgaangagggttgngtttttannccnggtgggtgattnaaccccattgtatggagnnaaaggntttnagggatttttcggctcttatcagtatntanattcctgtnaatcggaaaatnatntttcnncnggaaaatnttgctcccatccgnaaattnctcccgggtagtgcatnttngggggncngccangtttcccaggctgctanaatcgtactaaagnttnaagtgggantncaaatgaaaacctnncacagagnatccntacccgactgtnnnttnccttcgccctntgactctgcnngagcccaatacccnngngnatgtcncccngnnnngcgncnctgaaannnnctcgnggctnngancatcanggggtttcgcatcaaaagcnncgtttcncatnaaggcactttngcctcatccaaccnctngccctcnnccatttngccgtcnggttcncctacgctnntngcncctnnntnganattttncccgcctngggnaancctcctgnaatgggtagggncttntcttttnaccnngnggtntactaatcnnctncacgcntnctttctcnaccccccccctttttcaatcccancggcnaatggggtctccccnncganggggggnnncccanncc

SEQ ID NO: 29 - DNA, 822 bp, Homo sapien
  misc_feature (1)...(822): n = A,T,C or G
actagtccagtgtggtggaattccattgtgttggggncncttctatgantantnttagatcgctcanacctcacancctcccnacnangcctataangaanannaataganctgtncnntatntntacnctcatanncctcnnnacccactccctcttaacccntactgtgcctatngcntnnctantctntgccgcctncnanccaccngtgggccnaccncnngnattctcnatctcctcnccatntngcctanantangtncataccctatacctacnccaatgctannnctaancntccatnanttannntaactaccactgacntngactttcncatnanctcctaatttgaatctactctgactcccacngcctannnattagcancntcccccnacnatntctcaaccaaatcntcaacaacctatctanctgttcnccaaccnttncctccgatccccnnacaacccccctcccaaatacccnccacctgacncctaacccncaccatcccggcaagccnanggncatttanccactggaatcacnatngganaaaaaaaacccnaactctctancncnnatctccctaanaaatnctcctnnaatttactnncantnccatcaancccacntgaaacnnaacccctgtttttanatcccttctttcgaaaaccnaccctttannncccaacctttngggcccccccnctncccnaatgaaggncncccaatcnangaaacgnccntgaaaaancnaggcnaanannntccgcanatcctatcccttanttnggggncccttncccngggcccc

SEQ ID NO: 30 - DNA, 787 bp, Homo sapien
  misc_feature (1)...(787): n = A,T,C or G
cggccgcctgctctggcacatgcctcctgaatggcatcaaaagtgatggactgcccattgctagagaagaccttctctcctactgtcattatggagccctgcagactgagggctccccttgtctgcaggatttgatgtctgaagtcgtggagtgtggcttggagctcctcatctacatnagctggaagccctggagggcctctctcgccagcctcccccttctctccacgctctccanggacaccaggggctccaggcagcccattattcccagnangacatggtgtttctccacgcggacccatggggcctgnaaggccagggtctcctttgacaccatctctcccgtcctgcctggcaggccgtgggatccactanttctanaacggncgccaccncggtgggagctccagcttttgttcccnttaatgaaggttaattgcncgcttggcgtaatcatnggtcanaactntttcctgtgtgaaattgtttntcccctcncnattccncncnacatacnaacccggaancataaagtgttaaagcctgggggtngcctnnngaatnaactnaactcaattaattgcgttggctcatggcccgctttccnttcnggaaaactgtcntcccctgcnttnntgaatcggccaccccccngggaaaagcggtttgcnttttngggggntccttccncttcccccctcnctaanccctncgcctcggtcgttncnggtngcggggaangggnatnnnctcccncnaagggggngagnnngntatccccaaa

SEQ ID NO: 31 - DNA, 799 bp, Homo sapien
  misc_feature (1)...(799): n = A,T,C or G
tttttttttttttttttggcgatgctactgtttaattgcaggaggtgggggtgtgtgtaccatgtaccagggctattagaagcaagaaggaaggagggagggcagagcgccctgctgagcaacaaaggactcctgcagccttctctgtctgtctcttggcgcaggcacatggggaggcctcccgcagggtgggggccaccagtccaggggtgggagcactacanggggtgggagtgggtggtggctggtncnaatggcctgncacanatccctacgattcttgacacctggatttcaccaggggaccttctgttctcccanggnaacttcntnnatctcnaaagaacacaactgtttcttcngcanttctggctgttcatggaaagcacaggtgtccnatttnggctgggacttggtacatatggttccggcccacctctcccntcnaanaagtaattcacccccccccnccntctnttgcctgggcccttaantacccacaccggaactcanttanttattcatcttnggntgggcttgntnatcnccncctgaangcgccaagttgaaaggccacgccgtncccnctccccatagnannttttnncntcanctaatgcccccccnggcaacnatccaatccccccccntgggggccccagcccanggcccccgnctcgggnnnccngncncgnantccccaggntctcccantcngncccnnngcncccccgcacgcagaacanaaggntngagccnccgcannnnnnnggtnncnacctcgccccccccnncgnng

SEQ ID NO: 32 - DNA, 789 bp, Homo sapien
  misc_feature (1)...(789): n = A,T,C or G
ttttttttttttttttttttttttttttttttttttttttttttttttttttttttttttttttnccnagggcaggtttattgacaacctcncgggacacaancaggctggggacaggacggcaacaggctccggcggcggcggcggcggccctacctgcggtaccaaatntgcagcctccgctcccgcttgatnttcctctgcagctgcaggatgccntaaaacagggcctcggccntnggtgggcaccctgggatttnaatttccacgggcacaatgcggtcgcancccctcaccaccnattaggaatagtggtnttacccnccnccgttggcncactccccntggaaaccacttntcgcggctccggcatctggtcttaaaccttgcaaacnctggggccctctttttggttantntnccngccacaatcatnactcagactggcncgggctggccccaaaaaancnccccaaaaccggnccatgtcttnncggggttgctgcnatntncatcacctcccgggcncancaggncaacccaaaagttcttgnggcccncaaaaaanctccggggggncccagtttcaacaaagtcatcccccttggcccccaaatcctccccccgnttnctgggtttgggaacccacgcctctnnctttggnnggcaagntggntcccccttcgggcccccggtgggcccnnctctaangaaaacnccntcctnnncaccatccccccnngnnacgnctancaangnatccctttttttanaaacgggccccccncg

SEQ ID NO: 33 - DNA, 793 bp, Homo sapien
  misc_feature (1)...(793): n = A,T,C or G
gacagaacatgttggatggtggagcacctttctatacgacttacaggacagcagatggggaattcatggctgttggagcaatanaaccccagttctacgagctgctgatcaaaggacttggactaaagtctgatgaacttcccaatcagatgagcatggatgattggccagaaatgaanaagaagtttgcagatgtatttgcaaagaagacgaaggcagagtggtgtcaaatctttgacggcacagatgcctgtgtgactccggttctgacttttgaggaggttgttcatcatgatcacaacaangaacggggctcgtttatcaccantgaggagcaggacgtgagcccccgccctgcacctctgctgttaaacaccccagccatcccttctttcaaaagggatccactacttctagagcggncgccaccgcggtggagctccagcttttgttccctttagtgagggttaattgcgcgcttggcgtaatcatggtcatanctgtttcctgtgtgaaattgttatccgctcacaattccacacaacatacganccggaagcatnaaattttaaagcctggnggtngcctaatgantgaactnactcacattaattggctttgcgctcactgcccgctttccagtccggaaaacctgtccttgccagctgccnttaatgaatcnggccaccccccggggaaaaggcngtttgcttnttggggcgcncttcccgctttctcgcttcctgaantccttccccccggtctttcggcttgcggcnaacggtatcnacct

SEQ ID NO: 34 - DNA, 756 bp, Homo sapien
  misc_feature (1)...(756): n = A,T,C or G
gccgcgaccggcatgtacgagcaactcaagggcgagtggaaccgtaaaagccccaatcttancaagtgcggggaanagctgggtcgactcaagctagttcttctggagctcaacttcttgccaaccacagggaccaagctgaccaaacagcagctaattctggcccgtgacatactggagatcggggcccaatggagcatcctacgcaangacatcccctccttcgagcgctacatggcccagctcaaatgctactactttgattacaangagcagctccccgagtcagcctatatgcaccagctcttgggcctcaacctcctcttcctgctgtcccagaaccgggtggctgantnccacacgganttggancggctgcctgcccaangacatacanaccaatgtctacatcnaccaccagtgtcctggagcaatactgatgganggcagctaccncaaagtnttcctggccnagggtaacatcccccgccgagagctacaccttcttcattgacatcctgctcgacactatcagggatgaaaatcgcngggttgctccagaaaggctncaanaanatccttttcnctgaaggcccccggatncnctagtnctagaatcggcccgccatcgcggtggancctccaacctttcgttnccctttactgagggttnattgccgcccttggcgttatcatggtcacnccngttncctgtgttgaaattnttaaccccccacaattccacgccnacattng

SEQ ID NO: 35 - DNA, 834 bp, Homo sapien
  misc_feature (1)...(834): n = A,T,C or G
ggggatctctanatcnacctgnatgcatggttgtcggtgtggtcgctgtcgatgaanatgaacaggatcttgcccttgaagctctcggctgctgtntttaagttgctcagtctgccgtcatagtcagacacnctcttgggcaaaaaacancaggatntgagtcttgatttcacctccaataatcttcngggctgtctgctcggtgaactcgatgacnangggcagctggttgtgtntgataaantccancangttctccttggtgacctccccttcaaagttgttccggccttcatcaaacttctnnaanangannancccanctttgtcgagctggnatttgganaacacgtcactgttggaaactgatcccaaatggtatgtcatccatcgcctctgctgcctgcaaaaaacttgcttggcncaaatccgactccccntccttgaaagaagccnatcacacccccctccctggactccnncaangactctnccgctnccccntccnngcagggttggtggcannccgggcccntgcgcttcttcagccagttcacnatnttcatcagcccctctgccagctgttntattccttgggggggaanccgtctctcccttcctgaannaactttgaccgtnggaatagccgcgcntcnccntacntnctgggccgggttcaaantccctccnttgncnntcncctcgggccattctggatttnccnaactttttccttcccccnccccncggngtttggntttttcatngggccccaactctgctnttggccantcccctgggggcntntancnccccctntggtcccntngggcc

SEQ ID NO: 36 - DNA, 814 bp, Homo sapien
  misc_feature (1)...(814): n = A,T,C or G
cggncgctttccngccgcgccccgtttccatgacnaaggctcccttcangttaaatacnncctagnaaacattaatgggttgctctactaatacatcatacnaaccagtaagcctgcccanaacgccaactcaggccattcctaccaaaggaagaaaggctggtctctccaccccctgtaggaaaggcctgccttgtaagacaccacaatncggctgaatctnaagtcttgtgttttactaatggaaaaaaaaaataaacaanaggttttgttctcatggctgcccaccgcagcctggcactaaaacancccagcgctcacttctgcttgganaaatattctttgctcttttggacatcaggcttgatggtatcactgccacntttccacccagctgggcncccttcccccatntttgtcantganctggaaggcctgaancttagtctccaaaagtctcngcccacaagaccggccaccaggggangtcntttncagtggatctgccaaanantacccntatcatcnntgaataaaaaggcccctgaacganatgcttccancancctttaagacccataatcctngaaccatggtgcccttccggtctgatccnaaaggaatgttcctgggtcccantccctcctttgttncttacgttgtnttggacccntgctngnatnacccaantganatccccngaagcaccctncccctggcatttgantttcntaaattctctgccctacnnctgaaagcacnattccctnggcnccnaanggngaactcaagaaggtctnngaaaaaccacncn

SEQ ID NO: 37 - DNA, 760 bp, Homo sapien
  misc_feature (1)...(760): n = A,T,C or G
gcatgctgctcttcctcaaagttgttcttgttgccataacaaccaccataggtaaagcgggcgcagtgttcgctgaaggggttgtagtaccagcgcgggatgctctccttgcagagtcctgtgtctggcaggtccacgcaatgccctttgtcactggggaaatggatgcgctggagctcgtcnaanccactcgtgtatttttcacangcagcctcctccgaagcntccgggcagttgggggtgtcgtcacactccactaaactgtcgatncancagcccattgctgcagcggaactgggtgggctgacaggtgccagaacacactggatnggcctttccatggaagggcctgggggaaatcncctnancccaaactgcctctcaaaggccaccttgcacaccccgacaggctagaaatgcactcttcttcccaaaggtagttgttcttgttgcccaagcancctccancaaaccaaaancttgcaaaatctgctccgtgggggtcatnnntaccanggttggggaaanaaacccggcngnganccnccttgtttgaatgcnaaggnaataatcctcctgtcttgcttgggtggaanagcacaattgaactgttaacnttgggccgngttccnctngggtggtctgaaactaatcaccgtcactggaaaaaggtangtgccttccttgaattcccaaanttcccctngntttgggtnntttctcctctnccctaaaaatcgtnttccccccccntanggcg

SEQ ID NO: 38 - DNA, 724 bp, Homo sapien
  misc_feature (1)...(724): n = A,T,C or G
tttttttttttttttttttttttttttttttttttaaaaaccccctccattgaatgaaaacttccnaaattgtccaaccccctcnnccaaatnnccatttccgggggggggttccaaacccaaattaattttggantttaaattaaatnttnattnggggaanaanccaaatgtnaagaaaatttaacccattatnaacttaaatncctngaaacccntggnttccaaaaatttttaacccttaaatccctccgaaattgntaanggaaaaccaaattcncctaaggctntttgaaggttngatttaaacccccttnanttnttttnacccnngnctnaantatttngnttccggtgttttcctnttaancntnggtaactcccgntaatgaannnccctaanccaattaaaccgaattttttttgaattggaaattccnngggaattnaccggggtttttcccntttgggggccatncccccnctttcggggtttgggnntaggttgaatttttnnangncccaaaaaancccccaanaaaaaaactcccaagnnttaattngaatntcccccttcccaggccttttgggaaaggngggtttntgggggccnggganttcnttcccccnttnccnccccccccccnggtaaanggttatngnntttggtttttgggccccttnanggaccttccggatngaaattaaatccccgggncggccg

SEQ ID NO: 39 - DNA, 751 bp, Homo sapien
  misc_feature (1)...(751): n = A,T,C or G
tttttttttttttttctttgctcacatttaatttttattttgattttttttaatgctgcacaacacaatatttatttcatttgtttcttttatttcattttatttgtttgctgctgctgttttatttatttttactgaaagtgagagggaacttttgtggccttttttcctttttctgtaggccgccttaagctttctaaatttggaacatctaagcaagctgaanggaaaagggggtttcgcaaaatcactcgggggaanggaaaggttgctttgttaatcatgccctatggtgggtgattaactgcttgtacaattacntttcacttttaattaattgtgctnaangctttaattanacttgggggttccctccccanaccaaccccnctgacaaaaagtgccngccctcaaatnatgtcccggcnntcnttgaaacacacngcngaangttctcattntccccncnccaggtnaaaatgaagggttaccatntttaacnccacctccacntggcnnngcctgaatcctcnaaaancnccctcaancnaattnctnngccccggtcncgcntnngtcccncccgggctccgggaantncacccccngaanncnntnncnaacnaaattccgaaaatattcccnntcnctcaattcccccnnagactntcctcnncnancncaattttcttttnntcacgaacncgnnccnnaaaatgnnnnncncctccnctngtccnnaatcnccanc

SEQ ID NO: 40 - DNA, 753 bp, Homo sapien
  misc_feature (1)...(753): n = A,T,C or G
gtggtattttctgtaagatcaggtgttcctccctcgtaggtttagaggaaacaccctcatagatgaaaacccccccgagacagcagcactgcaactgccaagcagccggggtaggaggggcgccctatgcacagctgggcccttgagacagcagggcttcgatgtcaggctcgatgtcaatggtctggaagcggcggctgtacctgcgtaggggcacaccgtcagggcccaccaggaacttctcaaagttccaggcaacntcgttgcgacacaccggagaccaggtgatnagcttggggtcggtcataancgcggtggcgtcgtcgctgggagctggcagggcctcccgcaggaaggcnaataaaaggtgcgcccccgcaccgttcanctcgcacttctcnaanaccatgangttgggctcnaacccaccaccannccggacttccttganggaattcccaaatctcttcgntcttgggcttctnctgatgccctanctggttgcccngnatgccaancanccccaanccccggggtcctaaancacccncctcctcntttcatctgggttnttntccccggaccntggttcctctcaagggancccatatctcnaccantactcaccntncccccccntgnnacccanccttctanngnttcccncccgncctctggcccntcaaanangcttncacnacctgggtctgccttcccccctnccctatctgnaccccncntttgtctcantnt

SEQ ID NO: 41 - DNA, 341 bp, Homo sapien
actatatccatcacaacagacatgcttcatcccatagacttcttgacatagcttcaaatgagtgaacccatccttgatttatatacatatatgttctcagtattttgggagcctttccacttctttaaaccttgttcattatgaacactgaaaataggaatttgtgaagagttaaaaagttatagcttgtttacgtagtaagtttttgaagtctacattcaatccagacacttagttgagtgttaaactgtgatttttaaaaaatatcatttgagaatattctttcagaggtattttcatttttactttttgattaattgtgttttatatattagggtagt

SEQ ID NO: 42 - DNA, 101 bp, Homo sapien
acttactgaatttagttctgtgctcttccttatttagtgttgtatcataaatactttgatgtttcaaacattctaaataaataattttcagtggcttcata

SEQ ID NO: 43 - DNA, 305 bp, Homo sapien
acatctttgttacagtctaagatgtgttcttaaatcaccattccttcctggtcctcaccctccagggtggtctcacactgtaattagagctattgaggagtctttacagcaaattaagattcagatgccttgctaagtctagagttctagagttatgtttcagaaagtctaagaaacccacctcttgagaggtcagtaaagaggacttaatatttcatatctacaaaatgaccacaggattggatacagaacgagagttatcctggataactcagagctgagtacctgcccgggggccgctcgaa

SEQ ID NO: 44 - DNA, 852 bp, Homo sapien
  misc_feature (1)...(852): n = A,T,C or G
acataaatatcagagaaaagtagtctttgaaatatttacgtccaggagttctttgtttctgattatttggtgtgtgttttggtttgtgtccaaagtattggcagcttcagttttcattttctctccatcctcgggcattcttcccaaatttatataccagtcttcgtccatccacacgctccagaatttctcttttgtagtaatatctcatagctcggctgagcttttcataggtcatgctgctgttgttcttctttttaccccatagctgagccactgcctctgatttcaagaacctgaagacgccctcagatcggtcttcccattttattaatcctgggttcttgtctgggttcaagaggatgtcgcggatgaattcccataagtgagtccctctcgggttgtgctttttggtgtggcacttggcaggggggtcttgctcctttttcatatcaggtgactctgcaacaggaaggtgactggtggttgtcatggagatctgagcccggcagaaagttttgctgtccaacaaatctactgtgctaccatagttggtgtcatataaatagttctngtctttccaggtgttcatgatggaaggctcagtttgttcagtcttgacaatgacattgtgtgtggactggaacaggtcactactgcactggccgttccacttcagatgctgcaagttgctgtagaggagntgccccgccgtccctgccgcccgggtgaactcctgcaaactcatgctgcaaaggtgctcgccgttgatgtcgaactcntggaaagggatacaattggcatccagctggttggtgtccaggaggtgatggagccactcccacacctggt

SEQ ID NO: 45 - DNA, 234 bp, Homo sapien
acaacagacccttgctcgctaacgacctcatgctcatcaagttggacgaatccgtgtccgagtctgacaccatccggagcatcagcattgcttcgcagtgccctaccgcggggaactcttgcctcgtttctggctggggtctgctggcgaacggcagaatgcctaccgtgctgcagtgcgtgaacgtgtcggtggtgtctgaggaggtctgcagtaagctctatgacccgctgt

SEQ ID NO: 46 - DNA, 590 bp, Homo sapien
  misc_feature (1)...(590): n = A,T,C or G
actttttatttaaatgtttataaggcagatctatgagaatgatagaaaacatggtgtgtaatttgatagcaatattttggagattacagagttttagtaattaccaattacacagttaaaaagaagataatatattccaagcanatacaaaatatctaatgaaagatcaaggcaggaaaatgantataactaattgacaatggaaaatcaattttaatgtgaattgcacattatcctttaaaagctttcaaaanaaanaattattgcagtctanttaattcaaacagtgttaaatggtatcaggataaanaactgaagggcanaaagaattaattttcacttcatgtaacncacccanatttacaatggcttaaatgcanggaaaaagcagtggaagtagggaagtantcaaggtctttctggtctctaatctgccttactctttgggtgtggctttgatcctctggagacagctgccagggctcctgttatatccacaatcccagcagcaagatgaagggatgaaaaaggacacatgctgccttcctttgaggagacttcatctcactggccaacactcagtcacatgt

SEQ ID NO: 47 - DNA, 774 bp, Homo sapien
  misc_feature (1)...(774): n = A,T,C or G
acaagggggcataatgaaggagtgggganagattttaaagaaggaaaaaaaacgaggccctgaacagaattttcctgnacaacggggcttcaaaataattttcttggggaggttcaagacgcttcactgcttgaaacttaaatggatgtgggacanaattttctgtaatgaccctgagggcattacagacgggactctgggaggaaggataaacagaaaggggacaaaggctaatcccaaaacatcaaagaaaggaaggtggcgtcatacctcccagcctacacagttctccagggctctcctcatccctggaggacgacagtggaggaacaactgaccatgtccccaggctcctgtgtgctggctcctggtcttcagcccccagctctggaagcccaccctctgctgatcctgcgtggcccacactccttgaacacacatccccaggttatattcctggacatggctgaacctcctattcctacttccgagatgccttgctccctgcagcctgtcaaaatcccactcaccctccaaaccacggcatgggaagcctttctgacttgcctgattactccagcatcttggaacaatccctgattccccactccttagaggcaagatagggtggttaagagtagggctggaccacttggagccaggctgctggcttcaaattntggctcatttacgagctatgggaccttgggcaagtnatcttcacttctatgggcntcattttgttctacctgcaaaatgggggataataatagt

SEQ ID NO: 48 - DNA, 124 bp, Homo sapien
  misc_feature (1)...(124): n = A,T,C or G
canaaattgaaattttataaaaaggcatttttctcttatatccataaaatgatataatttttgcaantatanaaatgtgtcataaattataatgttccttaattacagctcaacgcaacttggt

SEQ ID NO: 49 - DNA, 147 bp, Homo sapien
  misc_feature (1)...(147): n = A,T,C or G
gccgatgctactattttattgcaggaggtgggggtgtttttattattctctcaacagctttgtggctacaggtggtgtctgactgcatnaaaaanttttttacgggtgattgcaaaaattttagggcacccatatcccaagcantgt

SEQ ID NO: 50 - DNA, 107 bp, Homo sapien
acattaaattaataaaaggactgttggggttctgctaaaacacatggcttgatatattgcatggtttgaggttaggaggagttaggcatatgttttgggagaggggt

SEQ ID NO: 51 - DNA, 204 bp, Homo sapien
gtcctaggaagtctaggggacacacgactctggggtcacggggccgacacacttgcacggcgggaaggaaaggcagagaagtgacaccgtcagggggaaatgacagaaaggaaaatcaaggccttgcaaggtcagaaaggggactcagggcttccaccacagccctgccccacttggccacctcccttttgggaccagcaatgt

SEQ ID NO: 52 - DNA, 491 bp, Homo sapien
  misc_feature (1)...(491): n = A,T,C or G
acaaagataacatttatcttataacaaaaatttgatagttttaaaggttagtattgtgtagggtattttccaaaagactaaagagataactcaggtaaaaagttagaaatgtataaaacaccatcagacaggtttttaaaaaacaacatattacaaaattagacaatcatccttaaaaaaaaaacttcttgtatcaatttcttttgttcaaaatgactgacttaantatttttaaatatttcanaaacacttcctcaaaaattttcaanatggtagctttcanatgtnccctcagtcccaatgttgctcagataaataaatctcgtgagaacttaccacccaccacaagctttctggggcatgcaacagtgtcttttctttnctttttctttttttttttttacaggcacagaaactcatcaattttatttggataacaaagggtctccaaattatattgaaaaataaatccaagttaatatcactcttgt

SEQ ID NO: 53 - DNA, 484 bp, Homo sapien
  misc_feature (1)...(484): n = A,T,C or G
acataatttagcagggctaattaccataagatgctatttattaanaggtntatgatctgagtattaacagttgctgaagtttggtatttttatgcagcattttctttttgctttgataacactacagaacccttaaggacactgaaaattagtaagtaaagttcagaaacattagctgctcaatcaaatctctacataacactatagtaattaaaacgttaaaaaaaagtgttgaaatctgcactagtatanaccgctcctgtcaggataanactgctttggaacagaaagggaaaaancagctttgantttctttgtgctgatangaggaaaggctgaattaccttgttgcctctccctaatgattggcaggtcnggtaaatnccaaaacatattccaactcaacacttcttttccncgtancttgantctgtgtattccaggancaggcggatggaatgggccagcccncggatgttccant

SEQ ID NO: 54 - DNA, 151 bp, Homo sapien
actaaacctcgtgcttgtgaactccatacagaaaacggtgccatccctgaacacggctggccactgggtatactgctgacaaccgcaacaacaaaaacacaaatccttggcactggctagtctatgtcctctcaagtgcctttttgtttgt

SEQ ID NO: 55 - DNA, 91 bp, Homo sapien
acctggcttgtctccgggtggttcccggcgccccccacggtccccagaacggacactttcgccctccagtggatactcgagccaaagtggt

SEQ ID NO: 56 - DNA, 133 bp, Homo sapien
ggcggatgtgcgttggttatatacaaatatgtcattttatgtaagggacttgagtatacttggatttttggtatctgtgggttggggggacggtccaggaaccaataccccatggataccaagggacaactgt

SEQ ID NO: 57 - DNA, 147 bp, Homo sapien
  misc_feature (1)...(147): n = A,T,C or G
actctggagaacctgagccgctgctccgcctctgggatgaggtgatgcangcngtggcgcgactgggagctgagcccttccctttgcgcctgcctcagaggattgttgccgacntgcanatctcantgggctggatncatgcagggt

SEQ ID NO: 58 - DNA, 198 bp, Homo sapien
  misc_feature (1)...(198): n = A,T,C or G
acagggatataggtttnaagttattgtnattgtaaaatacattgaattttctgtatactctgattacatacatttatcctttaaaaaagatgtaaatcttaatttttatgccatctattaatttaccaatgagttaccttgtaaatgagaagtcatgatagcactgaattttaactagttttgacttctaagtttggt

SEQ ID NO: 59 - DNA, 330 bp, Homo sapien
acaacaaatgggttgtgaggaagtcttatcagcaaaactggtgatggctactgaaaagatccattgaaaattatcattaatgattttaaatgacaagttatcaaaaactcactcaattttcacctgtgctagcttgctaaaatgggagttaactctagagcaaatatagtatcttctgaatacagtcaataaatgacaaagccagggcctacaggtggtttccagactttccagacccagcagaaggaatctattttatcacatggatctccgtctgtgctcaaaatacctaatgatatttttcgtctttattggacttctttgaagagt

SEQ ID NO: 60 - DNA, 175 bp, Homo sapien
accgtgggtgccttctacattcctgacggctccttcaccaacatctggttctacttcggcgtcgtgggctccttcctcttcatcctcatccagctggtgctgctcatcgactttgcgcactcctggaaccagcggtggctgggcaaggccgaggagtgcgattcccgtgcctggt

SEQ ID NO: 61 - DNA, 154 bp, Homo sapien
accccacttttcctcctgtgagcagtctggacttctcactgctacatgatgagggtgagtggttgttgctcttcaacagtatcctcccctttccggatctgctgagccggacagcagtgctggactgcacagccccggggctccacattgctgt

SEQ ID NO: 62 - DNA, 30 bp, Homo sapien
cgctcgagccctatagtgagtcgtattaga

SEQ ID NO: 63 - DNA, 89 bp, Homo sapien
acaagtcatttcagcaccctttgctcttcaaaactgaccatcttttatatttaatgcttcctgtatgaataaaaatggttatgtcaagt

SEQ ID NO: 64 - DNA, 97 bp, Homo sapien
accggagtaactgagtcgggacgctgaatctgaatccaccaataaataaaggttctgcagaatcagtgcatccaggattggtccttggatctggggt

SEQ ID NO: 65 - DNA, 377 bp, Homo sapien
  misc_feature (1)...(377): n = A,T,C or G
acaacaanaantcccttctttaggccactgatggaaacctggaacccccttttgatggcagcatggcgtcctaggccttgacacagcggctggggtttgggctntcccaaaccgcacaccccaaccctggtctacccacanttctggctatgggctgtctctgccactgaacatcagggttcggtcataanatgaaatcccaanggggacagaggtcagtagaggaagctcaatgagaaaggtgctgtttgctcagccagaaaacagctgcctggcattcgccgctgaactatgaacccgtgggggtgaactacccccangaggaatcatgcctgggcgatgcaanggtgccaacaggaggggcgggaggagcatgt

SEQ ID NO: 66 - DNA, 305 bp, Homo sapien
acgcctttccctcagaattcagggaagagactgtcgcctgccttcctccgttgttgcgtgagaacccgtgtgccccttcccaccatatccaccctcgctccatctttgaactcaaacacgaggaactaactgcaccctggtcctctccccagtccccagttcaccctccatccctcaccttcctccactctaagggatatcaacactgcccagcacaggggccctgaatttatgtggtttttatatattttttaataagatgcactttatgtcattttttaataaagtctgaagaattactgttt

SEQ ID NO: 67 - DNA, 385 bp, Homo sapien
actacacacactccacttgcccttgtgagacactttgtcccagcactttaggaatgctgaggtcggaccagccacatctcatgtgcaagattgcccagcagacatcaggtctgagagttccccttttaaaaaaggggacttgcttaaaaaagaagtctagccacgattgtgtagagcagctgtgctgtgctggagattcacttttgagagagttctcctctgagacctgatctttagaggctgggcagtcttgcacatgagatggggctggtctgatctcagcactccttagtctgcttgcctctcccagggccccagcctggccacacctgcttacagggcactctcagatgcccataccatagtttctgtgctagtggaccgt

SEQ ID NO: 68 - DNA, 73 bp, Homo sapien
acttaaccagatatatttttaccccagatggggatattctttgtaaaaaatgaaaataaagtttttttaatgg

SEQ ID NO: 69 - DNA, 536 bp, Homo sapien
  misc_feature (1)...(536): n = A,T,C or G
actagtccagtgtggtggaattccattgtgttgggggctctcaccctcctctcctgcagctccagctttgtgctctgcctctgaggagaccatggcccagcatctgagtaccctgctgctcctgctggccaccctagctgtggccctggcctggagccccaaggaggaggataggataatcccgggtggcatctataacgcagacctcaatgatgagtgggtacagcgtgcccttcacttcgccatcagcgagtataacaaggccaccaaagatgactactacagacgtccgctgcgggtactaagagccaggcaacagaccgttgggggggtgaattacttcttcgacgtagaggtgggccgaaccatatgtaccaagtcccagcccaacttggacacctgtgccttccatgaacagccagaactgcagaagaaacagttgtgctctttcgagatctacgaagttccctggggagaacagaangtccctgggtgaaatccaggtgtcaagaaatcctanggatctgttgccaggc

SEQ ID NO: 70 - DNA, 477 bp, Homo sapien
atgacccctaacaggggccctctcagccctcctaatgacctccggcctagccatgtgatttcacttccactccataacgctcctcatactaggcctactaaccaacacactaaccatataccaatgatggcgcgatgtaacacgagaaagcacataccaaggccaccacacaccacctgtccaaaaaggccttcgatacgggataatcctatttattacctcagaagtttttttcttcgcagggatttttctgagccttttaccactccagcctagcccctaccccccaactaggagggcactggcccccaacaggcatcaccccgctaaatcccctagaagtcccactcctaaacacatccgtattactcgcatcaggagtatcaatcacctgagctcaccatagtctaatagaaaacaaccgaaaccaaattattcaaagcactgcttattacaattttactgggtctctatttt

SEQ ID NO: 71 - DNA, 533 bp, Homo sapien
  misc_feature (1)...(533): n = A,T,C or G
agagctataggtacagtgtgatctcagctttgcaaacacattttctacatagatagtactaggtattaatagatatgtaaagaaagaaatcacaccattaataatggtaagattggtttatgtgattttagtggtatttttggcacccttatatatgttttccaaactttcagcagtgatattatttccataacttaaaaagtgagtttgaaaaagaaaatctccagcaagcatctcatttaaataaaggtttgtcatctttaaaaatacagcaatatgtgactttttaaaaaagctgtcaaataggtgtgaccctactaataattattagaaatacatttaaaaacatcgagtacctcaagtcagtttgccttgaaaaatatcaaatataactcttagagaaatgtacataaaagaatgcttcgtaattttggagtangaggttccctcctcaattttgtatttttaaaaagtacatggtaaaaaaaaaaattcacaacagtatataaggctgtaaaatgaagaattctgcc

SEQ ID NO: 72 - DNA, 511 bp, Homo sapien
  misc_feature (1)...(511): n = A,T,C or G
tattacggaaaaacacaccacataattcaactancaaagaanactgcttcagggcgtgtaaaatgaaaggcttccaggcagttatctgattaaagaacactaaaagagggacaaggctaaaagccgcaggatgtctacactatancaggcgctatttgggttggctggaggagctgtggaaaacatgganagattggtgctgganatcgccgtggctattcctcattgttattacanagtgaggttctctgtgtgcccactggtttgaaaaccgttctncaataatgatagaatagtacacacatgagaactgaaatggcccaaacccagaaagaaagcccaactagatcctcagaanacgcttctagggacaataaccgatgaagaaaagatggcctccttgtgcccccgtctgttatgatttctctccattgcagcnanaaacccgttcttctaagcaaacncaggtgatgatggcnaaaatacaccccctcttgaagnaccnggagga

SEQ ID NO: 73 - DNA, 499 bp, Homo sapien
  misc_feature (1)...(499): n = A,T,C or G
cagtgccagcactggtgccagtaccagtaccaataacagtgccagtgccagtgccagcaccagtggtggcttcagtgctggtgccagcctgaccgccactctcacatttgggctcttcgctggccttggtggagctggtgccagcaccagtggcagctctggtgcctgtggtttctcctacaagtgagattttagatattgttaatcctgccagtctttctcttcaagccagggtgcatcctcagaaacctactcaacacagcactctaggcagccactatcaatcaattgaagttgacactctgcattaaatctatttgccatttctgaaaaaaaaaaaaaaaaaagggcggccgctcgantctagagggcccgtttaaacccgctgatcagcctcgactgtgccttctanttgccagccatctgttgtttgcccctcccccgntgccttccttgaccctggaaagtgccactcccactgtcctttcctaantaaaat

SEQ ID NO: 74 - DNA, 537 bp, Homo sapien
  misc_feature (1)...(537): n = A,T,C or G
tttcataggagaacacactgaggagatacttgaagaatttggattcagccgcgaagagatttatcagcttaactcagataaaatcattgaaagtaataaggtaaaagctagtctctaacttccaggcccacggctcaagtgaatttgaatactgcatttacagtgtagagtaacacataacattgtatgcatggaaacatggaggaacagtattacagtgtcctaccactctaatcaagaaaagaattacagactctgattctacagtgatgattgaattctaaaaatggtaatcattagggcttttgatttataanactttgggtacttatactaaattatggtagttatactgccttccagtttgcttgatatatttgttgatattaagattcttgacttatattttgaatgggttctactgaaaaangaatgatatattcttgaagacatcgatatacatttatttacactcttgattctacaatgtagaaaatgaaggaaatgccccaaattgtatggtgataaaagtcccgt

SEQ ID NO: 75 - DNA, 467 bp, Homo sapien
  misc_feature (1)...(467): n = A,T,C or G
caaanacaattgttcaaaagatgcaaatgatacactactgctgcagctcacaaacacctctgcatattacacgtacctcctcctgctcctcaagtagtgtggtctattttgccatcatcacctgctgtctgcttagaagaacggctttctgctgcaanggagagaaatcataacagacggtggcacaaggaggccatcttttcctcatcggttattgtccctagaagcgtcttctgaggatctagttgggctttctttctgggtttgggccatttcanttctcatgtgtgtactattctatcattattgtataacggttttcaaaccngtgggcacncagagaacctcactctgtaataacaatgaggaatagccacggtgatctccagcaccaaatctctccatgttnttccagagctcctccagccaacccaaatagccgctgctatngtgtagaacatccctgn

SEQ ID NO: 76 - DNA, 400 bp, Homo sapien
  misc_feature (1)...(400): n = A,T,C or G
aagctgacagcattcgggccgagatgtctcgctccgtggccttagctgtgctcgcgctactctctctttctggcctggaggctatccagcgtactccaaagattcaggtttactcacgtcatccagcagagaatggaaagtcaaatttcctgaattgctatgtgtctgggtttcatccatccgacattgaagttgacttactgaagaatggagagagaattgaaaaagtggagcattcagacttgtctttcagcaaggactggtctttctatctcttgtactacactgaattcacccccactgaaaaagatgagtatgcctgccgtgtgaaccatgtgactttgtcacagcccaagatngttnagtgggatcganacatgtaagcagcancatgggaggt

SEQ ID NO: 77 - DNA, 248 bp, Homo sapien
ctggagtgccttggtgtttcaagcccctgcaggaagcagaatgcaccttctgaggcacctccagctgccccggcgggggatgcgaggctcggagcacccttgcccggctgtgattgctgccaggcactgttcatctcagcttttctgtccctttgctcccggcaagcgcttctgctgaaagttcatatctggagcctgatgtcttaacgaataaaggtcccatgctccacccgaaaaaaaaaaaaaaa

SEQ ID NO: 78 - DNA, 201 bp, Homo sapien
actagtccagtgtggtggaattccattgtgttgggcccaacacaatggctacctttaacatcacccagaccccgccctgcccgtgccccacgctgctgctaacgacagtatgatgcttactctgctactcggaaactatttttatgtaattaatgtatgctttcttgtttataaatgcctgatttaaaaaaaaaaaaaaaa

SEQ ID NO: 79 - DNA, 552 bp, Homo sapien
  misc_feature (1)...(552): n = A,T,C or G
tccttttgttaggtttttgagacaaccctagacctaaactgtgtcacagacttctgaatgtttaggcagtgctagtaatttcctcgtaatgattctgttattactttcctattctttattcctctttcttctgaagattaatgaagttgaaaattgaggtggataaatacaaaaaggtagtgtgatagtataagtatctaagtgcagatgaaagtgtgttatatatatccattcaaaattatgcaagttagtaattactcagggttaactaaattactttaatatgctgttgaacctactctgttccttggctagaaaaaattataaacaggactttgttagtttgggaagccaaattgataatattctatgttctaaaagttgggctatacataaantatnaagaaatatggaattttattcccaggaatatggggttcatttatgaatantacccggganagaagttttgantnaaaccngttttggttaatacgttaatatgtcctnaatnaacaaggcntgacttatttccaaaaaaaaaaaaaaaaa

SEQ ID NO: 80 - DNA, 476 bp, Homo sapien
  misc_feature (1)...(476): n = A,T,C or G
acagggatttgagatgctaaggccccagagatcgtttgatccaaccctcttattttcagaggggaaaatggggcctagaagttacagagcatctagctggtgcgctggcacccctggcctcacacagactcccgagtagctgggactacaggcacacagtcactgaagcaggccctgtttgcaattcacgttgccacctccaacttaaacattcttcatatgtgatgtccttagtcactaaggttaaactttcccacccagaaaaggcaacttagataaaatcttagagtactttcatactcttctaagtcctcttccagcctcactttgagtcctccttgggggttgataggaantntctcttggctttctcaataaaatctctatccatctcatgtttaatttggtacgcntaaaaatgctgaaaaaattaaaatgttctggtttcnctttaaaaaaaaaaaaaaaaaaaaaaa

SEQ ID NO: 81 - DNA, 232 bp, Homo sapien
  misc_feature (1)...(232): n = A,T,C or G
tttttttttgtatgccntcnctgtggngttattgttgctgccaccctggaggagcccagtttcttctgtatctttcttttctgggggatcttcctggctctgcccctccattcccagcctctcatccccatcttgcacttttgctagggttggaggcgctttcctggtagcccctcagagactcagtcagcgggaataagtcctaggggtggggggtgtggcaagccggcct

SEQ ID NO: 82 - DNA, 383 bp, Homo sapien
  misc_feature (1)...(383): n = A,T,C or G
aggcgggagcagaagctaaagccaaagcccaagaagagtggcagtgccagcactggtgccagtaccagtaccaataacatgccagtgccagtgccagcaccagtggtggcttcagtgctggtgccagcctgaccgccactctcacatttgggctcttcgctggccttggtggagctggtgccagcaccagtggcagctctggtgcctgtggtttctcctacaagtgagattttagatattgttaatcctgccagtctttctcttcaagccagggtgcatcctcagaaacctactcaacacagcactctnggcagccactatcaatcaattgaagttgacactctgcattaaatctatttgccatttcaaaaaaaaaaaaaaaa

SEQ ID NO: 83 - DNA, 494 bp, Homo sapien
  misc_feature (1)...(494): n = A,T,C or G
accgaattgggaccgctggcttataagcgatcatgtcctccagtattacctcaacgagcagggagatcgagtctatacgctgaagaaatttgacccgatgggacaacagacctgctcagcccatcctgctcggttctccccagatgacaaatactctcgacaccgaatcaccatcaagaaacgcttcaaggtgctcatgacccagcaaccgcgccctgtcctctgagggtccttaaactgatgtcttttctgccacctgttacccctcggagactccgtaaccaaactcttcggactgtgagccctgatgcctttttgccagccatactctttggcntccagtctctcgtggcgattgattatgcttgtgtgaggcaatcatggtggcatcacccatnaagggaacacatttganttttttttcncatattttaaattacnaccagaatanttcagaataaatgaattgaaaaactcttaaaaaaaaaaaaaaa

SEQ ID NO: 84 - DNA, 380 bp, Homo sapien
  misc_feature (1)...(380): n = A,T,C or G
gctggtagcctatggcgtggccacggangggctcctgaggcacgggacagtgacttcccaagtatcctgcgccgcgtcttctaccgtccctacctgcagatcttcgggcagattccccaggaggacatggacgtggccctcatggagcacagcaactgctcgtcggagcccggcttctgggcacaccctcctggggcccaggcgggcacctgcgtctcccagtatgccaactggctggtggtgctgctcctcgtcatcttcctgctcgtggccaacatcctgctggtcacttgctcattgccatgttcagttacacattcggcaaagtacagggcaacagcnatctctactgggaaggccagcgttnccgcctcatccgg

SEQ ID NO: 85 - DNA, 481 bp, Homo sapien
  misc_feature (1)...(481): n = A,T,C or G
gagttagctcctccacaaccttgatgaggtcgtctgcagtggcctctcgcttcataccgctnccatcgtcatactgtaggtttgccaccacctcctgcatcttggggcggctaatatccaggaaactctcaatcaagtcaccgtcnatnaaacctgtggctggttctgtcttccgctcggtgtgaaaggatctccagaaggagtgctcgatcttccccacacttttgatgactttattgagtcgattctgcatgtccagcaggaggttgtaccagctctctgacagtgaggtcaccagccctatcatgccnttgaacgtgccgaagaacaccgagccttgtgtggggggtgnagtctcacccagattctgcattaccaganagccgtggcaaaaganattgacaactcgcccaggnngaaaaagaacacctcctggaagtgctngccgctcctcgtccnttggtggnngcgcntncctttt

SEQ ID NO: 86 - DNA, 472 bp, Homo sapien
  misc_feature (1)...(472): n = A,T,C or G
aacatcttcctgtataatgctgtgtaatatcgatccgatnttgtctgctgagaattcattacttggaaaagcaacttnaagcctggacactggtattaaaattcacaatatgcaacactttaaacagtgtgtcaatctgctcccttactttgtcatcaccagtctgggaataagggtatgccctattcacacctgttaaaagggcgctaagcatttttgattcaacatctttttttttgacacaagtccgaaaaaagcaaaagtaaacagttnttaatttgttagccaattcactttcttcatgggacagagccatttgatttaaaaagcaaattgcataatattgagctttgggagctgatatntgagcggaagantagcctttctacttcaccagacacaactcctttcatattgggatgttnacnaaagttatgtctcttacagatgggatgcttttgtggcaattctg

SEQ ID NO: 87 - DNA, 413 bp, Homo sapien
  misc_feature (1)...(413): n = A,T,C or G
agaaaccagtatctctnaaaacaacctctcataccttgtggacctaattttgtgtgcgtgtgtgtgtgcgcgcatattatatagacaggcacatcttttttacttttgtaaaagcttatgcctctttggtatctatatctgtgaaagttttaatgatctgccataatgtcttggggacctttgtcttctgtgtaaatggtactagagaaaacacctatnttatgagtcaatctagttngttttattcgacatgaaggaaatttccagatnacaacactnacaaactctcccttgactaggggggacaaagaaaagcanaactgaacatnagaaacaattncctggtgagaaattncataaacagaaattgggtngtatattgaaananngcatcattnaaacgtttttttttt

SEQ ID NO: 88 - DNA, 448 bp, Homo sapien
  misc_feature (1)...(448): n = A,T,C or G
cgcagcgggtcctctctatctagctccagcctctcgcctgccccactccccgcgtcccgcgtcctagccnaccatggccgggcccctgcgcgccccgctgctcctgctggccatcctggccgtggccctggccgtgagccccgcggccggctccagtcccggcaagccgccgcgcctggtgggaggcccatggaccccgcgtggaagaagaaggtgtgcggcgtgcactggactttgccgtcggcnantacaacaaacccgcaacnacttttaccnagcncgcgctgcaggttgtgccgccccaancaaattgttactnggggtaantaattcttggaagttgaacctgggccaaacnngtttaccagaaccnagccaattngaacaattncccctccataacagccccttttaaaaagggaancantcctgntcttttccaaatttt

SEQ ID NO: 89 - DNA, 463 bp, Homo sapien
  misc_feature (1)...(463): n = A,T,C or G
gaattttgtgcactggccactgtgatggaaccattgggccaggatgctttgagtttatcagtagtgattctgccaaagttggtgttgtaacatgagtatgtaaaatgtcaaaaaattagcagaggtctaggtctgcatatcagcagacagtttgtccgtgtattttgtagccttgaagttctcagtgacaagttnnttctgatgcgaagttctnattccagtgttttagtcctttgcatctttnatgttnagacttgcctctntnaaattgcttttgtnttctgcaggtactatctgtggtttaacaaaatagaannacttctctgcttngaanatttgaatatcttacatctnaaaatnaattctctccccatannaaaacccangcccttggganaatttgaaaaanggntccttcnnaattcnnanaanttcagntntcatacaacanaacnggancccc

SEQ ID NO: 90 - DNA, 400 bp, Homo sapien
  misc_feature (1)...(400): n = A,T,C or G
agggattgaaggtctnttntactgtcggactgttcanccaccaactctacaagttgctgtcttccactcactgtctgtaagcntnttaacccagactgtatcttcataaatagaacaaattcttcaccagtcacatcttctaggacctttttggattcagttagtataagctcttccacttcctttgttaagacttcatctggtaaagtcttaagttttgtagaaaggaatttaattgctcgttctctaacaatgtcctctccttgaagtatttggctgaacaacccacctnaagtccctttgtgcatccattttaaatatacttaatagggcattggtncactaggttaaattctgcaagagtcatctgtctgcaaaagttgcgttagtatatctgcca

SEQ ID NO: 91 - DNA, 480 bp, Homo sapien
  misc_feature (1)...(480): n = A,T,C or G
gagctcggatccaataatctttgtctgagggcagcacacatatncagtgccatggnaactggtctaccccacatgggagcagcatgccgtagntatataaggtcattccctgagtcagacatgcctctttgactaccgtgtgccagtgctggtgattctcacacacctccnnccgctctttgtggaaaaactggcacttgnctggaactagcaagacatcacttacaaattcacccacgagacacttgaaaggtgtaacaaagcgactcttgcattgctttttgtccctccggcaccagttgtcaatactaacccgctggtttgcctccatcacatttgtgatctgtagctctggatacatctcctgacagtactgaagaacttcttcttttgtttcaaaagcaactcttggtgcctgttngatcaggttcccatttcccagtccgaatgttcacatggcatatnttacttcccacaaaa

SEQ ID NO: 92 - DNA, 477 bp, Homo sapien
  misc_feature (1)...(477): n = A,T,C or G
atacagcccanatcccaccacgaagatgcgcttgttgactgagaacctgatgcggtcactggtcccgctgtagccccagcgactctccacctgctggaagcggttgatgctgcactccttcccacgcaggcagcagcggggccggtcaatgaactccactcgtggcttggggttgacggttaantgcaggaagaggctgaccacctcgcggtccaccaggatgcccgactgtgcgggacctgcagcgaaactcctcgatggtcatgagcgggaagcgaatgangcccagggccttgcccagaaccttccgcctgttctctggcgtcacctgcagctgctgccgctnacactcggcctcggaccagcggacaaacggcgttgaacagccgcacctcacggatgcccantgtgtcgcgctccaggaacggcnccagcgtgtccaggtcaatgtcggtgaancctccgcgggtaatggcg

SEQ ID NO: 93 - DNA, 377 bp, Homo sapien
  misc_feature (1)...(377): n = A,T,C or G
gaacggctggaccttgcctcgcattgtgctgctggcaggaataccttggcaagcagctccagtccgagcagccccagaccgctgccgcccgaagctaagcctgcctctggccttcccctccgcctcaatgcagaaccantagtgggagcactgtgtttagagttaagagtgaacactgtntgattttacttgggaatttcctctgttatatagcttttcccaatgctaatttccaaacaacaacaacaaaataacatgtttgcctgttnagttgtataaaagtangtgattctgtatntaaagaaaatattactgttacatatactgcttgcaanttctgtatttattggtnctctggaaataaatatattattaaa

SEQ ID NO: 94 - DNA, 495 bp, Homo sapien
  misc_feature (1)...(495): n = A,T,C or G
ccctttgaggggttagggtccagttcccagtggaagaaacaggccaggagaantgcgtgccgagctgangcagatttcccacagtgaccccagagccctgggctatagtctctgacccctccaaggaaagaccaccttctggggacatgggctggagggcaggacctagaggcaccaagggaaggccccattccggggctgttccccgaggaggaagggaaggggctctgtgtgccccccacgaggaanaggccctgantcctgggatcanacaccccttcacgtgtatccccacacaaatgcaagctcaccaaggtcccctctcagtcccttccctacaccctgaacggncactggcccacacccacccagancanccacccgccatggggaatgtnctcaaggaatcgcngggcaacgtggactctngtcccnnaagggggcagaatctccaatagangganngaacccttgctnanaaaaaaaaanaaaaaa

SEQ ID NO: 95 - DNA, 472 bp, Homo sapien
  misc_feature (1)...(472): n = A,T,C or G
ggttacttggtttcattgccaccacttagtggatgtcatttagaaccattttgtctgctccctctggaagccttgcgcagagcggactttgtaattgttggagaataactgctgaatttttagctgttttgagttgattcgcaccactgcaccacaactcaatatgaaaactatttnacttatttattatcttgtgaaaagtatacaatgaaaattttgttcatactgtatttatcaagtatgatgaaaagcaatagatatatattcttttattatgttnaattatgattgccattattaatcggcaaaatgtggagtgtatgttcttttcacagtaatatatgccttttgtaacttcacttggttattttattgtaaatgaattacaaaattcttaatttaagaaaatggtangttatatttanttcantaatttctttccttgtttacgttaattttgaaaagaatgcat

SEQ ID NO: 96 - DNA, 476 bp, Homo sapien
  misc_feature (1)...(476): n = A,T,C or G
ctgaagcatttcttcaaacttntctacttttgtcattgatacctgtagtaagttgacaatgtggtgaaatttcaaaattatatgtaacttctactagttttactttctcccccaagtcttttttaactcatgatttttacacacacaatccagaacttattatatagcctctaagtctttattcttcacagtagatgatgaaagagtcctccagtgtcttgngcanaatgttctagntatagctggatacatacngtgggagttctataaactcatacctcagtgggactnaaccaaaattgtgttagtctcaattcctaccacactgagggagcctcccaaatcactatattcttatctgcaggtactcctccagaaaaacngacagggcaggcttgcatgaaaaagtnacatctgcgttacaaagtctatcttcctcanangtctgtnaaggaacaatttaatcttctagcttt

SEQ ID NO: 97 - DNA, 479 bp, Homo sapien
  misc_feature (1)...(479): n = A,T,C or G
actctttctaatgctgatatgatcttgagtataagaatgcatatgtcactagaatggataaaataatgctgcaaacttaatgttcttatgcaaaatggaacgctaatgaaacacagcttacaatcgcaaatcaaaactcacaagtgctcatctgttgtagatttagtgtaataagacttagattgtgctccttcggatatgattgtttctcanatcttgggcaatnttccttagtcaaatcaggctactagaattctgttattggatatntgagagcatgaaatttttaanaatacacttgtgattatnaaattaatcacaaatttcacttatacctgctatcagcagctagaaaaacatntnntttttanatcaaagtattttgtgtttggaantgtnnaaatgaaatctgaatgtgggttcnatcttattttttcccngacnactanttncttttttagggnctattctganccatc

SEQ ID NO: 98 - DNA, 461 bp, Homo sapien
agtgacttgtcctccaacaaaaccccttgatcaagtttgtggcactgacaatcagacctatgctagttcctgtcatctattcgctactaaatgcagactggaggggaccaaaaaggggcatcaactccagctggattattttggagcctgcaaatctattcctacttgtacggactttgaagtgattcagtttcctctacggatgagagactggctcaagaatatcctcatgcagctttatgaagccactctgaacacgctggttatctagatgagaacagagaaataaagtcagaaaatttacctggagaaaagaggctttggctggggaccatcccattgaaccttctcttaaggactttaagaaaaactaccacatgttgtgtatcctggtgccggccgtttatgaactgaccaccctttggaataatcttgacgctcctgaacttgctcctctgcga

SEQ ID NO: 99 - DNA, 171 bp, Homo sapien
gtggccgcgcgcaggtgtttcctcgtaccgcagggccccctcccttccccaggcgtccctcggcgcctctgcgggcccgaggaggagcggctggcgggtggggggagtgtgacccaccctcggtgagaaaagccttctctagcgatctgagaggcgtgccttgggggtacc

SEQ ID NO: 100 - DNA, 269 bp, Homo sapien
cggccgcaagtgcaactccagctggggccgtgcggacgaagattctgccagcagttggtccgactgcgacgacggcggcggcgacagtcgcaggtgcagcgcgggcgcctggggtcttgcaaggctgagctgacgccgcagaggtcgtgtcacgtcccacgaccttgacgccgtcggggacagccggaacagagcccggtgaagcgggaggcctcggggagcccctcgggaagggcggcccgagagatacgcaggtgcaggtggccgcc

SEQ ID NO: 101 - DNA, 405 bp, Homo sapien
ttttttttttttttggaatctactgcgagcacagcaggtcagcaacaagtttattttgcagctagcaaggtaacagggtagggcatggttacatgttcaggtcaacttcctttgtcgtggttgattggtttgtctttatgggggcggggtggggtaggggaaacgaagcaaataacatggagtgggtgcaccctccctgtagaacctggttacaaagcttggggcagttcacctggtctgtgaccgtcattttcttgacatcaatgttattagaagtcaggatatcttttagagagtccactgttctggagggagattagggtttcttgccaaatccaacaaaatccactgaaaaagttggatgatcagtacgaataccgaggcatattctcatatcggtggcca

SEQ ID NO: 102 - DNA, 470 bp, Homo sapien
ttttttttttttttttttttttttttttttttttttttttttttttttttttttttttttggcacttaatccatttttatttcaaaatgtctacaaatttaatcccattatacggtattttcaaaatctaaattattcaaattagccaaatccttaccaaataatacccaaaaatcaaaaatatacttctttcagcaaacttgttacataaattaaaaaaatatatacggctggtgttttcaaagtacaattatcttaacactgcaaacattttaaggaactaaaataaaaaaaaacactccgcaaaggttaaagggaacaacaaattcttttacaacaccattataaaaatcatatctcaaatcttaggggaatatatacttcacacgggatcttaacttttactcactttgtttatttttttaaaccattgtttgggcccaacacaatggaatcccccctggactagt

SEQ ID NO: 103 - DNA, 581 bp, Homo sapien
ttttttttttttttttttgacccccctcttataaaaaacaagttaccattttattttacttacacatatttattttataattggtattagatattcaaaaggcagcttttaaaatcaaactaaatggaaactgccttagatacataattcttaggaattagcttaaaatctgcctaaagtgaaaatcttctctagctcttttgactgtaaatttttgactcttgtaaaacatccaaattcatttttcttgtctttaaaattatctaatctttccattttttccctattccaagtcaatttgcttctctagcctcatttcctagctcttatctactattagtaagtggcttttttcctaaaagggaaaacaggaagagaaatggcacacaaaacaaacattttatattcatatttctacctacgttaataaaatagcattttgtgaagccagctcaaaagaaggcttagatccttttatgtccattttagtcactaaacgatatcaaagtgccagaatgcaaaaggtttgtgaacatttattcaaaagctaatataagatatttcacatactcatctttctg

SEQ ID NO: 104 - DNA, 578 bp, Homo sapien
tttttttttttttttttttttttttctcttctttttttttgaaatgaggatcgagtttttcactctctagatagggcatgaagaaaactcatctttccagctttaaaataacaatcaaatctcttatgctatatcatattttaagttaaactaatgagtcactggcttatcttctcctgaaggaaatctgttcattcttctcattcatatagttatatcaagtactaccttgcatattgagaggtttttcttctctatttacacatatatttccatgtgaatttgtatcaaacctttattttcatgcaaactagaaaataatgtttcttttgcataagagaagagaacaatatagcattacaaaactgctcaaattgtttgttaagttatccattataattagttggcaggagctaatacaaatcacatttacgacagcaataataaaactgaagtaccagttaaatatccaaaataattaaaggaacatttttagcctgggtataattagctaattcactttacaagcatttattagaatgaattcacatgttattattcctagcccaacacaatgg

SEQ ID NO: 105 - DNA, 538 bp, Homo sapien
tttttttttttttttcagtaataatcagaacaatatttatttttatatttaaaattcatagaaaagtgccttacatttaataaaagtttgtttctcaaagtgatcagaggaattagatatgtcttgaacaccaatattaatttgaggaaaatacaccaaaatacattaagtaaattatttaagatcatagagcttgtaagtgaaaagataaaatttgacctcagaaactctgagcattaaaaatccactattagcaaataaattactatggacttcttgctttaattttgtgatgaatatggggtgtcactggtaaaccaacacattctgaaggatacattacttagtgatagattcttatgtactttgctaatacgtggatatgagttgacaagtttctctttcttcaatcttttaaggggcgagaaatgaggaagaaaagaaaaggattacgcatactgttctttctatggaaggattagatatgtttcctttgccaatattaaaaaaataataatgtttactactagtgaaaccc

SEQ ID NO: 106 - DNA, 473 bp, Homo sapien
ttttttttttttttttagtcaagtttctatttttattataattaaagtcttggtcatttcatttattagctctgcaacttacatatttaaattaaagaaacgttttagacaactgtacaatttataaatgtaaggtgccattattgagtaatatattcctccaagagtggatgtgtcccttctcccaccaactaatgaacagcaacattagtttaattttattagtagatatacactgctgcaaacgctaattctcttctccatccccatgtgatattgtgtatatgtgtgagttggtagaatgcatcacaatctacaatcaacagcaagatgaagctaggctgggctttcggtgaaaatagactgtgtctgtctgaatcaaatgatctgacctatcctcggtggcaagaactcttcgaaccgcttcctcaaaggcgctgccacatttgtggctctttgcacttgtttcaaaa

SEQ ID NO: 107 - DNA, 1621 bp, Homo sapien
cgccatggcactgcagggcatctcggtcatggagctgtccggcctggccccgggcccgttctgtgctatggtcctggctgacttcggggcgcgtgtggtacgcgtggaccggcccggctcccgctacgacgtgagccgcttgggccggggcaagcgctcgctagtgctggacctgaagcagccgcggggagccgccgtgctgcggcgtctgtgcaagcggtcggatgtgctgctggagcccttccgccgcggtgtcatggagaaactccagctgggcccagagattctgcagcgggaaaatccaaggcttatttatgccaggctgagtggatttggccagtcaggaagcttctgccggttagctggccacgatatcaactatttggctttgtcaggtgttctctcaaaaattggcagaagtggtgagaatccgtatgccccgctgaatctcctggctgactttgctggtggtggccttatgtgtgcactgggcattataatggctctttttgaccgcacacgcactgacaagggtcaggtcattgatgcaaatatggtggaaggaacagcatatttaagttcttttctgtggaaaactcagaaatcgagtctgtgggaagcacctcgaggacagaacatgttggatggtggagcacctttctatacgacttacaggacagcagatggggaattcatggctgttggagcaatagaaccccagttctacgagctgctgatcaaaggacttggactaaagtctgatgaacttcccaatcagatgagcatggatgattggccagaaatgaagaagaagtttgcagatgtatttgcaaagaagacgaaggcagagtggtgtcaaatctttgacggcacagatgcctgtgtgactccggttctgacttttgaggaggttgttcatcatgatcacaacaaggaacggggctcgtttatcaccagtgaggagcaggacgtgagcccccgccctgcacctctgctgttaaacaccccagccatcccttctttcaaaagggatcctttcataggagaacacactgaggagatacttgaagaatttggattcagccgcgaagagatttatcagcttaactcagataaaatcattgaaagtaataaggtaaaagctagtctctaacttccaggcccacggctcaagtgaatttgaatactgcatttacagtgtagagtaacacataacattgtatgcatggaaacatggaggaacagtattacagtgtcctaccactctaatcaagaaaagaattacagactctgattctacagtgatgattgaattctaaaaatggttatcattagggcttttgatttataaaactttgggtacttatactaaattatggtagttattctgccttccagtttgcttgatatatttgttgatattaagattcttgacttatattttgaatgggttctagtgaaaaaggaatgatatattcttgaagacatcgatatacatttatttacactcttgattctacaatgtagaaaatgaggaaatgccacaaattgtatggtgataaaagtcacgtgaaacaaaaaaaaaaaaaaaaaaaaaaaaaaaaaaaaaaaaaaaaaaaaa

SEQ ID NO: 108 - protein, 382 aa, Homo sapien [sequence omitted]

SEQ ID NO: 109 - DNA, 1524 bp, Homo sapien
ggcacgaggctgcgccagggcctgagcggaggcgggggcagcctcgccagcgggggccccgggcctggccatgcctcactgagccagcgcctgcgcctctacctcgccgacagctggaaccagtgcgacctagtggctctcacctgcttcctcctgggcgtgggctgccggctgaccccgggtttgtaccacctgggccgcactgtcctctgcatcgacttcatggttttcacggtgcggctgcttcacatcttcacggtcaacaaacagctggggcccaagatcgtcatcgtgagcaagatgatgaaggacgtgttcttcttcctcttcttcctcggcgtgtggctggtagcctatggcgtggccacggaggggctcctgaggccacgggacagtgacttcccaagtatcctgcgccgcgtcttctaccgtccctacctgcagatcttcgggcagattccccaggaggacatggacgtggccctcatggagcacagcaactgctcgtcggagcccggcttctgggcacaccctcctggggcccaggcgggcacctgcgtctcccagtatgccaactggctggtggtgctgctcctcgtcatcttcctgctcgtggccaacatcctgctggtcaacttgctcattgccatgttcagttacacattcggcaaagtacagggcaacagcgatctctactggaaggcgcagcgttaccgcctcatccgggaattccactctcggcccgcgctggccccgccctttatcgtcatctcccacttgcgcctcctgctcaggcaattgtgcaggcgaccccggagcccccagccgtcctccccggccctcgagcatttccgggtttacctttctaaggaagccgagcggaagctgctaacgtgggaatcggtgcataaggagaactttctgctggcacgcgctagggacaagcgggagagcgactccgagcgtctgaagcgcacgtcccagaaggtggacttggcactgaaacagctgggacacatccgcgagtacgaacagcgcctgaaagtgctggagcgggaggtccagcagtgtagccgcgtcctggggtgggtggccgaggccctgagccgctctgccttgctgcccccaggtgggccgccaccccctgacctgcctgggtccaaagactgagccctgctggcggacttcaaggagaagcccccacaggggattttgctcctagagtaaggctcatctgggcctcggcccccgcacctggtggccttgtccttgaggtgagccccatgtccatctgggccactgtcaggaccacctttgggagtgtcatccttacaaaccacagcatgcccggctcctcccagaaccagtcccagcctgggaggatcaaggcctggatcccgggccgttatccatctggaggctgcagggtccttggggtaacagggaccacagacccctcaccactcacagattcctcacactggggaaataaagccatttcagaggaaaaaaaaaaaaaaaaaa

SEQ ID NO: 110 - DNA, 3410 bp, Homo sapien
gggaaccagcctgcacgcgctggctccgggtgacagccgcgcgcctcggccaggatctgagtgatgagacgtgtccccactgaggtgccccacagcagcaggtgttgagcatgggctgagaagctggaccggcaccaaagggctggcagaaatgggcgcctggctgattcctaggcagttggcggcagcaaggaggagaggccgcagcttctggagcagagccgagacgaagcagttctggagtgcctgaacggccccctgagccctacccgcctggcccactatggtccagaggctgtgggtgagccgcctgctgcggcaccggaaagcccagctcttgctggtcaacctgctaacctttggcctggaggtgtgtttggccgcaggcatcacctatgtgccgcctctgctgctggaagtgggggtagaggagaagttcatgaccatggtgctgggcattggtccagtgctgggcctggtctgtgtcccgctcctaggctcagccagtgaccactggcgtggacgctatggccgccgccggcccttcatctgggcactgtccttgggcatcctgctgagcctctttctcatcccaagggccggctggctagcagggctgctgtgcccggatcccaggcccctggagctggcactgctcatcctgggcgtggggctgctggacttctgtggccaggtgtgcttcactccactggaggccctgctctctgacctcttccgggacccggaccactgtcgccaggcctactctgtctatgccttcatgatcagtcttgggggctgcctgggctacctcctgcctgccattgactgggacaccagtgccctggccccctacctgggcacccaggaggagtgcctctttggcctgctcaccctcatcttcctcacctgcgtagcagccacactgctggtggctgaggaggcagcgctgggccccaccgagccagcagaagggctgtcggccccctccttgtcgccccactgctgtccatgccgggcccgcttggctttccggaacctgggcgccctgcttccccggctgcaccagctgtgctgccgcatgccccgcaccctgcgccggctcttcgtggctgagctgtgcagctggatggcactcatgaccttcacgctgttttacacggatttcgtgggcgaggggctgtaccagggcgtgcccagagctgagccgggcaccgaggcccggagacactatgatgaaggcgttcggatgggcagcctggggctgttcctgcagtgcgccatctccctggtcttctctctggtcatggaccggctggtgcagcgattcggcactcgagcagtctatttggccagtgtggcagctttccctgtggctgccggtgccacatgcctgtcccacagtgtggccgtggtgacagcttcagccgccctcaccgggttcaccttctcagccctgcagatcctgccctacacactggcctccctctaccaccgggagaagcaggtgttcctgcccaaataccgaggggacactggaggtgctagcagtgaggacagcctgatgaccagcttcctgccaggccctaagcctggagctcccttccctaatggacacgtgggtgctggaggcagtggcctgctcccacctccacccgcgctctgcggggcctctgcctgtgatgtctccgtacgtgtggtggtgggtgagcccaccgaggccagggtggttccgggccggggcatctgcctggacctcgccatcctggatagtgccttcctgctgtcccaggtggccccatccctgtttatgggctccattgtccagctcagccagtctgtcactgcctatatggtgtctgccgcaggcctgggtctggtcgccatttactttgctacacaggtagtatttgacaagagcgacttggccaaatactcagcgtagaaaacttccagcacattggggtggagggcctgcctcactgggtcccagctccccgctcctgttagccccatggggctgccgggctggccgccagtttctgttgctgccaaagtaatgtggctctctgctgccaccctgtgctgctgaggtgcgtagctgcacagctgggggctggggcgtccctctcctctctccccagtctctagggctgcctgactggaggccttccaagggggtttcagtctggacttatacagggaggccagaagggctccatgcactggaatgcggggactctgcaggtggattacccaggctcagggttaacagctagcctcctagttgagacacacctagagaagggtttttgggagctgaataaactcagtcacctggtttcccatctctaagccccttaacctgcagcttcgtttaatgtagctcttgcatgggagtttctaggatgaaacactcctccatgggatttgaacatatgacttatttgtaggggaagagtcctgaggggcaacacacaagaaccaggtcccctcagcccacagcactgtctttttgctgatccacccccctcttaccttttatcaggatgtggcctgttggtccttctgttgccatcacagagacacaggcatttaaatatttaacttatttatttaacaaagtagaagggaatccattgctagcttttctgtgttggtgtctaatatttgggtagggtgggggatccccaacaatcaggtcccctgagatagctggtcattgggctgatcattgccagaatcttcttctcctggggtctggccccccaaaatgcctaacccaggaccttggaaattctactcatcccaaatgataattccaaatgctgttacccaaggttagggtgttgaaggaaggtagagggtggggcttcaggtctcaacggcttccctaaccacccctcttctcttggcccagcctggttccccccacttccactcccctctactctctctaggactgggctgatgaaggcactgcccaaaatttcccctacccccaactttcccctacccccaactttccccaccagctccacaaccctgtttggagctactgcaggaccagaagcacaaagtgcggtttcccaagcctttgtccatctcagcccccagagtatatctgtgcttggggaatctcacacagaaactcaggagcaccccctgcctgagctaagggaggtcttatctctcagggggggtttaagtgccgtttgcaataatgtcgtcttatttatttagcggggtgaatattttatactgtaagtgagcaatcagagtataatgtttatggtgacaaaattaaaggctttcttatatgtttaaaaaaaaaaaaaaaaaaaaaaaaaaaaaaaaaaaaaaaaaaaraaaaaaaaaaaaaaaaaaaaaaaaaaaataaaaaaaaaaaa

SEQ ID NO: 111 - DNA, 1289 bp, Homo sapien
agccaggcgtccctctgcctgcccactcagtggcaacacccgggagctgttttgtcctttgtggagcctcagcagttccctctttcagaactcactgccaagagccctgaacaggagccaccatgcagtgcttcagcttcattaagaccatgatgatcctcttcaatttgctcatctttctgtgtggtgcagccctgttggcagtgggcatctgggtgtcaatcgatggggcatcctttctgaagatcttcgggccactgtcgtccagtgccatgcagtttgtcaacgtgggctacttcctcatcgcagccggcgttgtggtctttgctcttggtttcctgggctgctatggtgctaagactgagagcaagtgtgccctcgtgacgttcttcttcatcctcctcctcatcttcattgctgaggttgcagctgctgtggtcgccttggtgtacaccacaatggctgagcacttcctgacgttgctggtagtgcctgccatcaagaaagattatggttcccaggaagacttcactcaagtgtggaacaccaccatgaaagggctcaagtgctgtggcttcaccaactatacggattttgaggactcaccctacttcaaagagaacagtgcctttcccccattctgttgcaatgacaacgtcaccaacacagccaatgaaacctgcaccaagcaaaaggctcacgaccaaaaagtagagggttgcttcaatcagcttttgtatgacatccgaactaatgcagtcaccgtgggtggtgtggcagctggaattgggggcctcgagctggctgccatgattgtgtccatgtatctgtactgcaatctacaataagtccacttctgcctctgccactactgctgccacatgggaactgtgaagaggcaccctggcaagcagcagtgattgggggaggggacaggatctaacaatgtcacttgggccagaatggacctgccctttctgctccagacttggggctagatagggaccactccttttagcgatgcctgactttccttccattggtgggtggatgggtggggggcattccagagcctctaaggtagccagttctgttgcccattcccccagtctattaaacccttgatatgccccctaggcctagtggtgatcccagtgctctactgggggatgagagaaaggcattttatagcctgggcataagtgaaatcagcagagcctctgggtggatgtgtagaaggcacttcaaaatgcataaacctgttacaatgttaaaaaaaaaaaaaaaaa

SEQ ID NO: 112 - protein, 315 aa, Homo sapien
MVFTVRLLHIFTVNKQLGPKIVIVSKMMKDVFFFLFFLGVWLVAYGVATEGLLRPRDSDFPSILRRVFYRPYLQIFGQIPQEDMDVALMEHSNCSSEPGFWAHPPGAQAGTCVSQYANWLVVLLLVIFLLVANILLVNLLIAMFSYTFGKVQGNSDLYWKAQRYRLIREFHSRPALAPPFIVISHLRLLLRQLCRRPRSPQPSSPALEHFRVYLSKEAERKLLTWESVHKENFLLARARDKRESDSERLKRTSQKVDLALKQLGHIREYEQRLKVLEREVQQCSRVLGWVAEALSRSALLPPGGPPPPDLPGSKD

SEQ ID NO: 113 - protein, 553 aa, Homo sapien
MVQRLWVSRLLRHRKAQLLLVNLLTFGLEVCLAAGITYVPPLLLEVGVEEKFMTMVLGIGPVLGLVCVPLLGSASDHWRGRYGRRRPFIWALSLGILLSLFLIPRAGWLAGLLCPDPRPLELALLILGVGLLDFCGQVCFTPLEALLSDLFRDPDHCRQAYSVYAFMISLGGCLGYLLPAIDWDTSALAPYLGTQEECLFGLLTLIFLTCVAATLLVAEEAALGPTEPAEGLSAPSLSPHCCPCRARLAFRNLGALLPRLHQLCCRMPRTLRRLFVAELCSWMALMTFTLFYTDFVGEGLYQGVPRAEPGTEARRHYDEGVRMGSLGLFLQCAISLVFSLVMDRLVQRFGTRAVYLASVAAFPVAAGATCLSHSVAVVTASAALTGFTFSALQILPYTLASLYHREKQVFLPKYRGDTGGASSEDSLMTSFLPGPKPGAPFPNGHVGAGGSGLLPPPPALCGASACDVSVRVVVGEPTEARVVPGRGICLDLAILDSAFLLSQVAPSLFMGSIVQLSQSVTAYMVSAAGLGLVAIYFATQVVFDKSDLAKYSA

SEQ ID NO: 114 - protein, 241 aa, Homo sapien
MQCFSFIKTMMILFNLLIFLCGAALLAVGIWVSIDGASFLKIFGPLSSSAMQFVNVGYFLIAAGVVVFALGFLGCYGAKTESKCALVTFFFILLLIFIAEVAAAVVALVYTTMAEHFLTLLVVPAIKKDYGSQEDFTQVWNTTMKGLKCCGFTNYTDFEDSPYFKENSAFPPFCCNDNVTNTANETCTKQKAHDQKVEGCFNQLLYDIRTNAVTVGGVAAGIGGLELAAMIVSMYLYCNLQ

SEQ ID NO: 115 - DNA, 366 bp, Homo sapien
gctctttctctcccctcctctgaatttaattctttcaacttgcaatttgcaaggattacacatttcactgtgatgtatattgtgttgcaaaaaaaaaaaagtgtctttgtttaaaattacttggtttgtgaatccatcttgctttttccccattggaactagtcattaacccatctctgaactggtagaaaaacatctgaagagctagtctatcagcatctgacaggtgaattggatggttctcagaaccatttcacccagacagcctgtttctatcctgtttaataaattagtttgggttctctacatgcataacaaaccctgctccaatctgtcacataaaagtctgtgacttgaagtttagtc

SEQ ID NO: 116 - DNA, 282 bp, Homo sapien
  misc_feature (1)...(282): n = A,T,C or G
acaaagatgaaccatttcctatattatagcaaaattaaaatctacccgtattctaatattgagaaatgagatnaaacacaatnttataaagtctacttagagaagatcaagtgacctcaaagactttactattttcatattttaagacacatgatttatcctattttagtaacctggttcatacgttaaacaaaggataatgtgaacagcagagaggatttgttggcagaaaatctatgttcaatctngaactatctanatcacagacatttctattccttt

SEQ ID NO: 117 - DNA, 305 bp, Homo sapien
  misc_feature (1)...(305): n = A,T,C or G
acacatgtcgcttcactgccttcttagatgcttctggtcaacatanaggaacagggaccatatttatcctccctcctgaaacaattgcaaaataanacaaaatatatgaaacaattgcaaaataaggcaaaatatatgaaacaacaggtctcgagatattggaaatcagtcaatgaaggatactgatccctgatcactgtcctaatgcaggatgtgggaaacagatgaggtcacctctgtgactgccccagcttactgcctgtagagagtttctangctgcagttcagacagggagaaattgggt

SEQ ID NO: 118 - DNA, 71 bp, Homo sapien
  misc_feature (1)...(71): n = A,T,C or G
accaaggtgtntgaatctctgacgtggggatctctgattcccgcacaatctgagtggaaaaantcctgggt

SEQ ID NO: 119 - DNA, 212 bp, Homo sapien
  misc_feature (1)...(212): n = A,T,C or G
actccggttggtgtcagcagcacgtggcattgaacatngcaatgtggagcccaaaccacagaaaatggggtgaaattggccaactttctatnaacttatgttggcaantttgccaccaacagtaagctggcccttctaataaaagaaaattgaaaggtttctcactaancggaattaantaatggantcaaganactcccaggcctcagcgt

SEQ ID NO: 120 - DNA, 90 bp, Homo sapien
  misc_feature (1)...(90): n = A,T,C or G
actcgttgcanatcaggggccccccagagtcaccgttgcaggagtccttctggtcttgccctccgccggcgcagaacatgctggggtggt

SEQ ID NO: 121 - DNA, 218 bp, Homo sapien
  misc_feature (1)...(218): n = A,T,C or G
tgtancgtgaanacgacaganagggttgtcaaaaatggagaanccttgaagtcattttgagaataagatttgctaaaagatttggggctaaaacatggttattgggagacatttctgaagatatncangtaaattanggaatgaattcatggttcttttgggaattcctttacgatngccagcatanacttcatgtggggatancagctacccttgta

SEQ ID NO: 122 - DNA, 171 bp, Homo sapien
taggggtgtatgcaactgtaaggacaaaaattgagactcaactggcttaaccaataaaggcatttgttagctcatggaacaggaagtcggatggtggggcatcttcagtgctgcatgagtcaccaccccggcggggtcatctgtgccacaggtccctgttgacagtgcggt

SEQ ID NO: 123 - DNA, 76 bp, Homo sapien
  misc_feature (1)...(76): n = A,T,C or G
tgtagcgtgaagacnacagaatggtgtgtgctgtgctatccaggaacacatttattatcattatcaantattgtgt

SEQ ID NO: 124 - DNA, 131 bp, Homo sapien
acctttccccaaggccaatgtcctgtgtgctaactggccggctgcaggacagctgcaattcaatgtgctgggtcatatggaggggaggagactctaaaatagccaattttattctcttggttaagatttgt

SEQ ID NO: 125 - DNA, 432 bp, Homo sapien
actttatctactggctatgaaatagatggtggaaaattgcgttaccaactataccactggcttgaaaaagaggtgatagctcttcagaggacttgtgacttttgctcagatgctgaagaactacagtctgcatttggcagaaatgaagatgaatttggattaaatgaggatgctgaagatttgcctcaccaaacaaaagtgaaacaactgagagaaaattttcaggaaaaaagacagtggctcttgaagtatcagtcacttttgagaatgtttcttagttactgcatacttcatggatcccatggtgggggtcttgcatctgtaagaatggaattgattttgcttttgcaagaatctcagcaggaaacatcagaaccactattttctagccctctgtcagagcaaacctcagtgcctctcctctttgcttgt

SEQ ID NO: 126 - DNA, 112 bp, Homo sapien
acacaacttgaatagtaaaatagaaactgagctgaaatttctaattcactttctaaccatagtaagaatgatatttccccccagggatcaccaaatatttataaaaatttgt

SEQ ID NO: 127 - DNA, 54 bp, Homo sapien
accacgaaaccacaaacaagatggaagcatcaatccacttgccaagcacagcag

SEQ ID NO: 128 - DNA, 323 bp, Homo sapien
acctcattagtaattgttttgttgtttcatttttttctaatgtctcccctctaccagctcacctgagataacagaatgaaaatggaaggacagccagatttctcctttgctctctgctcattctctctgaagtctaggttacccattttggggacccattataggcaataaacacagttcccaaagcatttggacagtttcttgttgtgttttagaatggttttcctttttcttagccttttcctgcaaaaggctcactcagtcccttgcttgctcagtggactgggctccccagggcctaggctgccttcttttccatgtcc

SEQ ID NO: 129 - DNA, 192 bp, Homo sapien
  misc_feature (1)...(192): n = A,T,C or G
acatacatgtgtgtatatttttaaatatcacttttgtatcactctgactttttagcatactgaaaacacactaacataatttntgtgaaccatgatcagatacaacccaaatcattcatctagcacattcatctgtgatanaaagataggtgagtttcatttccttcacgttggccaatggataaacaaagt

SEQ ID NO: 130 - DNA, 362 bp, Homo sapien
  misc_feature (1)...(362): n = A,T,C or G
cccttttttatggaatgagtagactgtatgtttgaanatttanccacaacctctttgacatataatgacgcaacaaaaaggtgctgtttagtcctatggttcagtttatgcccctgacaagtttccattgtgttttgccgatcttctggctaatcgtggtatcctccatgttattagtaattctgtattccattttgttaacgcctggtagatgtaacctgctangaggctaactttatacttatttaaaagctcttattttgtggtcattaaaatggcaatttatgtgcagcactttattgcagcaggaagcacgtgtgggttggttgtaaagctctttgctaatcttaaaaagtaatggg

SEQ ID NO: 131 - DNA, 332 bp, Homo sapien
  misc_feature (1)...(332): n = A,T,C or G
ctttttgaaagatcgtgtccactcctgtggacatcttgttttaatggagtttcccatgcagtangactggtatggttgcagctgtccagataaaaacatttgaagagctccaaaatgagagttctcccaggttcgccctgctgctccaagtctcagcagcagcctcttttaggaggcatcttctgaactagattaaggcagcttgtaaatctgatgtgatttggtttattatccaactaacttccatctgttatcactggagaaagcccagactccccangacnggtacggattgtgggcatanaaggattgggtgaagctggcgttgtggt

SEQ ID NO: 132 - DNA, 322 bp, Homo sapien
  misc_feature (1)...(322): n = A,T,C or G
acttttgccattttgtatatataaacaatcttgggacattctcctgaaaactaggtgtccagtggctaagagaactcgatttcaagcaattctgaaaggaaaaccagcatgacacagaatctcaaattcccaaacaggggctctgtgggaaaaatgagggaggacctttgtatctcgggttttagcaagttaaaatgaanatgacaggaaaggcttatttatcaacaaagagaagagttgggatgcttctaaaaaaaactttggtagagaaaataggaatgctnaatcctagggaagcctgtaacaatctacaattggtcca

SEQ ID NO: 133 - DNA, 278 bp, Homo sapien
  misc_feature (1)...(278): n = A,T,C or G
acaagccttcacaagtttaactaaattgggattaatctttctgtanttatctgcataattcttgtttttctttccatctggctcctgggttgacaatttgtggaaacaactctattgctactatttaaaaaaaatcacaaatctttccctttaagctatgttnaattcaaactattcctgctattcctgttttgtcaaagaaattatatttttcaaaatatgtntatttgtttgatgggtcccacgaaacactaataaaaaccacagagaccagcctg

SEQ ID NO: 134 - DNA, 121 bp, Homo sapien
  misc_feature (1)...(121): n = A,T,C or G
gtttanaaaacttgtttagctccatagaggaaagaatgttaaactttgtattttaaaacatgattctctgaggttaaacttggttttcaaatgttatttttacttgtattttgcttttggt

SEQ ID NO: 135 - DNA, 350 bp, Homo sapien
  misc_feature (1)...(350): n = A,T,C or G
acttanaaccatgcctagcacatcagaatccctcaaagaacatcagtataatcctataccatancaagtggtgactggttaagcgtgcgacaaaggtcagctggcacattacttgtgtgcaaacttgatacttttgttctaagtaggaactagtatacagtncctaggantggtactccagggtgccccccaactcctgcagccgctcctctgtgccagnccctgnaaggaactttcgctccacctcaatcaagccctgggccatgctacctgcaattggctgaacaaacgtttgctgagttcccaaggatgcaaagcctggtgctcaactcctggggcgtcaactcagt

SEQ ID NO: 136 - DNA, 399 bp, Homo sapien
  misc_feature (1)...(399): n = A,T,C or G
tgtaccgtgaagacgacagaagttgcatggcagggacagggcagggccgaggccagggttgctgtgattgtatccgaatantcctcgtgagaaaagataatgagatgacgtgagcagcctgcagacttgtgtctgccttcaanaagccagacaggaaggccctgcctgccttggctctgacctggcggccagccagccagccacaggtgggcttcttccttttgtggtgacaacnccaagaaaactgcagaggcccagggtcaggtgtnagtgggtangtgaccataaaacaccaggtgctcccaggaacccgggcaaaggccatccccacctacagccagcatgcccactggcgtgatgggtgcaganggatgaagcagccagntgttctgctgtggt

SEQ ID NO: 137 - DNA, 165 bp, Homo sapien
  misc_feature (1)...(165): n = A,T,C or G
actggtgtggtngggggtgatgctggtggtanaagttgangtgacttcangatggtgtgtggaggaagtgtgtgaacgtagggatgtagangttttggccgtgctaaatgagcttcgggattggctggtcccactggtggtcactgtcattggtggggttcctgt

SEQ ID NO: 138 - DNA, 338 bp, Homo sapien
  misc_feature (1)...(338): n = A,T,C or G
actcactggaatgccacattcacaacagaatcagaggtctgtgaaaacattaatggctccttaacttctccagtaagaatcagggacttgaaatggaaacgttaacagccacatgcccaatgctgggcagtctcccatgccttccacagtgaaagggcttgagaaaaatcacatccaatgtcatgtgtttccagccacaccaaaaggtgcttggggtggagggctgggggcatananggtcangcctcaggaagcctcaagttccattcagctttgccactgtacattccccatntttaaaaaaactgatgccttttttttttttttttgtaaaattc

SEQ ID NO: 139 - DNA, 382 bp, Homo sapien
gggaatcttggtttttggcatctggtttgcctatagccgaggccactttgacagaacaaagaaagggacttcgagtaagaaggtgatttacagccagcctagtgcccgaagtgaaggagaattcaaacagacctcgtcattcctggtgtgagcctggtcggctcaccgcctatcatctgcatttgccttactcaggtgctaccggactctggcccctgatgtctgtagtttcacaggatgccttatttgtcttctacaccccacagggccccctacttcttcggatgtgtttttaataatgtcagctatgtgccccatcctccttcatgccctccctccctttcctaccactgctgagtggcctggaacttgtttaaagtgt

SEQ ID NO: 140 - DNA, 200 bp, Homo sapien
  misc_feature (1)...(200): n = A,T,C or G
accaaancttctttctgttgtgttngattttactataggggtttngcttnttctaaanatacttttcatttaacancttttgttaagtgtcaggctgcactttgctccatanaattattgttttcacatttcaacttgtatgtgtttgtctcttanagcattggtgaaatcacatattttatattcagcataaaggagaa

SEQ ID NO: 141 - DNA, 335 bp, Homo sapien
  misc_feature (1)...(335): n = A,T,C or G
actttattttcaaaacactcatatgttgcaaaaaacacatagaaaaataaagtttggtgggggtgctgactaaacttcaagtcacagacttttatgtgacagattggagcagggtttgttatgcatgtagagaacccaaactaatttattaaacaggatagaaacaggctgtctgggtgaaatggttctgagaaccatccaattcacctgtcagatgctgatanactagctcttcagatgtttttctaccagttcagagatnggttaatgactanttccaatggggaaaaagcaagatggattcacaaaccaagtaattttaaacaaagacactt

SEQ ID NO: 142 - DNA, 459 bp, Homo sapien
  misc_feature (1)...(459): n = A,T,C or G
accaggttaatattgccacatatatcctttccaattgcgggctaaacagacgtgtatttagggttgtttaaagacaacccagcttaatatcaagagaaattgtgacctttcatggagtatctgatggagaaaacactgagttttgacaaatcttattttattcagatagcagtctgatcacacatggtccaacaacactcaaataataaatcaaatatnatcagatgttaaagattggtcttcaaacatcatagccaatgatgccccgcttgcctataatctctccgacataaaaccacatcaacacctcagtggccaccaaaccattcagcacagcttccttaactgtgagctgtttgaagctaccagtctgagcactattgactatntttttcangctctgaatagctctagggatctcagcangggtgggaggaaccagctcaaccttggcgtant

SEQ ID NO: 143 - DNA, 140 bp, Homo sapien
acatttccttccaccaagtcaggactcctggcttctgtgggagttcttatcacctgagggaaatccaaacagtctctcctagaaaggaatagtgtcaccaaccccacccatctccctgagaccatccgacttccctgtgt

SEQ ID NO: 144 - DNA, 164 bp, Homo sapien
  misc_feature (1)...(164): n = A,T,C or G
acttcagtaacaacatacaataacaacattaagtgtatattgccatctttgtcattttctatctataccactctcccttctgaaaacaanaatcactanccaatcacttatacaaatttgaggcaattaatccatatttgttttcaataaggaaaaaaagatgt

SEQ ID NO: 145 - DNA, 303 bp, Homo sapien
  misc_feature (1)...(303): n = A,T,C or G
acgtagaccatccaactttgtatttgtaatggcaaacatccagnagcaattcctaaacaaactggagggtatttatacccaattatcccattcattaacatgccctcctcctcaggctatgcaggacagctatcataagtcggcccaggcatccagatactaccatttgtataaacttcagtaggggagtccatccaagtgacaggtctaatcaaaggaggaaatggaacataagcccagtagtaaaatnttgcttagctgaaacagccacaaaagacttaccgccgtggtgattaccatcaa

SEQ ID NO: 146 - DNA, 327 bp, Homo sapien
  misc_feature (1)...(327): n = A,T,C or G
actgcagctcaattagaagtggtctctgactttcatcancttctccctgggctccatgacactggcctggagtgactcattgctctggttggttgagagagctcctttgccaacaggcctccaagtcagggctgggatttgtttcctttccacattctagcaacaatatgctggccacttcctgaacagggagggtgggaggagccagcatggaacaagctgccactttctaaagtagccagacttgcccctgggcctgtcacacctactgatgaccttctgtgcctgcaggatggaatgtaggggtgagctgtgtgactctatggt

SEQ ID NO: 147 - DNA, 173 bp, Homo sapien
  misc_feature (1)...(173): n = A,T,C or G
acattgtttttttgagataaagcattganagagctctccttaacgtgacacaatggaaggactggaacacatacccacatctttgttctgagggataattttctgataaagtcttgctgtatattcaagcacatatgttatatattattcagttccatgtttatagcctagtt

SEQ ID NO: 148 - DNA, 477 bp, Homo sapien
  misc_feature (1)...(477): n = A,T,C or G
acaaccactttatctcatcgaatttttaacccaaactcactcactgtgcctttctatcctatgggatatattatttgatgctccatttcatcacacatatatgaataatacactcatactgccctactacctgctgcaataatcacattcccttcctgtcctgaccctgaagccattggggtggtcctagtggccatcagtccangcctgcaccttgagcccttgagctccattgctcacnccancccacctcaccgaccccatcctcttacacagctacctccttgctctctaaccccatagattatntccaaattcagtcaattaagttactattaacactctacccgacatgtccagcaccactggtaagccttctccagccaacacacacacacacacacncacacacacacatatccaggcacaggctacctcatcttcacaatcacccctttaattaccatgctatggtgg

SEQ ID NO: 149 - DNA, 207 bp, Homo sapien
acagttgtattataatatcaagaaataaacttgcaatgagagcatttaagagggaagaactaacgtattttagagagccaaggaaggtttctgtggggagtgggatgtaaggtggggcctgatgataaataagagtcagccaggtaagtgggtggtgtggtatgggcacagtgaagaacatttcaggcagagggaacagcagtgaaa

SEQ ID NO: 150 - DNA, 111 bp, Homo sapien
  misc_feature (1)...(111): n = A,T,C or G
accttgatttcattgctgctctgatggaaacccaactatctaatttagctaaaacatgggcacttaaatgtggtcagtgtttggacttgttaactantggcatctttgggt

SEQ ID NO: 151 - DNA, 196 bp, Homo sapien
agcgcggcaggtcatattgaacattccagatacctatcattactcgatgctgttgataacagcaagatggctttgaactcagggtcaccaccagctattggaccttactatgaaaaccatggataccaaccggaaaacccctatcccgcacagcccactgtggtccccactgtctacgaggtgcatccggctcagt

SEQ ID NO: 152 - DNA, 132 bp, Homo sapien
acagcactttcacatgtaagaagggagaaattcctaaatgtaggagaaagataacagaaccttccccttttcatctagtggtggaaacctgatgctttatgttgacaggaatagaaccaggagggagtttgt

SEQ ID NO: 153 - DNA, 285 bp, Homo sapien
  misc_feature (1)...(285): n = A,T,C or G
acaanacccanganaggccactggccgtggtgtcatggcctccaaacatgaaagtgtcagcttctgctcttatgtcctcatctgacaactctttaccatttttatcctcgctcagcaggagcacatcaataaagtccaaagtcttggacttggccttggcttggaggaagtcatcaacaccctggctagtgagggtgcggcgccgctcctggatgacggcatctgtgaagtcgtgcaccagtctgcaggccctgtggaagcgccgtccacacggagtnaggaatt

SEQ ID NO: 154 - DNA, 333 bp, Homo sapien
accacagtcctgttgggccagggcttcatgaccctttctgtgaaaagccatattatcaccaccccaaatttttccttaaatatctttaactgaaggggtcagcctcttgactgcaaagaccctaagccggttacacagctaactcccactggccctgatttgtgaaattgctgctgcctgattggcacaggagtcgaaggtgttcagctcccctcctccgtggaacgagactctgatttgagtttcacaaattctcgggccacctcgtcattgctcctctgaaataaaatccggagaatggtcaggcctgtctcatccatatggatcttccgg

SEQ ID NO: 155 - DNA, 308 bp, Homo sapien
  misc_feature (1)...(308): n = A,T,C or G
actggaaataataaaacccacatcacagtgttgtgtcaaagatcatcagggcatggatgggaaagtgctttgggaactgtaaagtgcctaacacatgatcgatgatttttgttataatatttgaatcacggtgcatacaaactctcctgcctgctcctcctgggccccagccccagccccatcacagctcactgctctgttcatccaggcccagcatgtagtggctgattcttcttggctgcttttagcctccanaagtttctctgaagccaaccaaacctctangtgtaaggcatgctggccctggt

SEQ ID NO: 156 - DNA, 295 bp, Homo sapien
accttgctcggtgcttggaacatattaggaactcaaaatatgagatgataacagtgcctattattgattactgagagaactgttagacatttagttgaagattttctacacaggaactgagaataggagattatgtttggccctcatattctctcctatcctccttgcctcattctatgtctaatatattctcaatcaaataaggttagcataatcaggaaatcgaccaaataccaatataaaaccagatgtctatccttaagattttcaaatagaaaacaaattaacagactat

SEQ ID NO: 157 - DNA, 126 bp, Homo sapien
acaagtttaaatagtgctgtcactgtgcatgtgctgaaatgtgaaatccaccacatttctgaagagcaaaacaaattctgtcatgtaatctctatcttgggtcgtgggtatatctgtccccttagt

SEQ ID NO: 158 - DNA, 442 bp, Homo sapien
  misc_feature (1)...(442): n = A,T,C or G
acccactggtcttggaaacacccatccttaatacgatgatttttctgtcgtgtgaaaatgaanccagcaggctgcccctagtcagtccttccttccagagaaaaagagatttgagaaagtgcctgggtaattcaccattaatttcctcccccaaactctctgagtcttcccttaatatttctggtggttctgaccaaagcaggtcatggtttgttgagcatttgggatcccagtgaagtanatgtttgtagccttgcatacttagcccttcccacgcacaaacggagtggcagagtggtgccaaccctgttttcccagtccacgtagacagattcacagtgcggaattctggaagctgganacagacgggctctttgcagagccgggactctgaganggacatgagggcctctgcctctgtgttcattctctgatgtcctgt

SEQ ID NO: 159 - DNA, 498 bp, Homo sapien
  misc_feature (1)...(498): n = A,T,C or G
acttccaggtaacgttgttgtttccgttgagcctgaactgatgggtgacgttgtaggttctccaacaagaactgaggttgcagagcgggtagggaagagtgctgttccagttgcacctgggctgctgtggactgttgttgattcctcactacggcccaaggttgtggaactggcanaaaggtgtgttgttgganttgagctcgggcggctgtggtaggttgtgggctcttcaacaggggctgctgtggtgccgggangtgaangtgttgtgtcacttgagcttggccagctctggaaagtantanattcttcctgaaggccagcgcttgtggagctggcangggtcantgttgtgtgtaacgaaccagtgctgctgtgggtgggtgtanatcctccacaaagcctgaagttatggtgtcntcaggtaanaatgtggtttcagtgtccctgggcngctgtggaaggttgtanattgtcaccaagggaataagctgtggt

SEQ ID NO: 160 - DNA, 380 bp, Homo sapien
  misc_feature (1)...(380): n = A,T,C or G
acctgcatccagcttccctgccaaactcacaaggagacatcaacctctagacagggaaacagcttcaggatacttccaggagacagagccaccagcagcaaaacaaatattcccatgcctggagcatggcatagaggaagctganaaatgtggggtctgaggaagccatttgagtctggccactagacatctcatcagccacttgtgtgaagagatgccccatgaccccagatgcctctcccacccttacctccatctcacacacttgagctttccactctgtataattctaacatcctggagaaaaatggcagtttgaccgaacctgttcacaacggtagaggctgatttctaacgaaacttgtagaatgaagcctgga

SEQ ID NO: 161 - DNA, 114 bp, Homo sapien
actccacatcccctctgagcaggcggttgtcgttcaaggtgtatttggccttgcctgtcacactgtccactggccccttatccacttggtgcttaatccctcgaaagagcatgt

SEQ ID NO: 162 - DNA, 177 bp, Homo sapien
actttctgaatcgaatcaaatgatacttagtgtagttttaatatcctcatatatatcaaagttttactactctgataattttgtaaaccaggtaaccagaacatccagtcatacagcttttggtgatatataacttggcaataacccagtctggtgatacataaaactactcactgt

SEQ ID NO: 163 - DNA, 137 bp, Homo sapien
  misc_feature (1)...(137): n = A,T,C or G
catttatacagacaggcgtgaagacattcacgacaaaaacgcgaaattctatcccgtgaccanagaaggcagctacggctactcctacatcctggcgtgggtggccttcgcctgcaccttcatcagcggcatgatgt

SEQ ID NO: 164 - DNA, 469 bp, Homo sapien
  misc_feature (1)...(469): n = A,T,C or G
cttatcacaatgaatgttctcctgggcagcgttgtgatctttgccaccttcgtgactttatgcaatgcatcatgctatttcatacctaatgagggagttccaggagattcaaccaggaaatgcatggatctcaaaggaaacaaacacccaataaactcggagtggcagactgacaactgtgagacatgcacttgctacgaaacagaaatttcatgttgcacccttgtttctacacctgtgggttatgacaaagacaactgccaaagaatcttcaagaaggaggactgcaagtatatcgtggtggagaagaaggacccaaaaaagacctgttctgtcagtgaatggataatctaatgtgcttctagtaggcacagggctcccaggccaggcctcattctcctctggcctctaatagtcaatgattgtgtagccatgcctatcagtaaaaagatntttgagcaaacacttt

SEQ ID NO: 165 - DNA, 195 bp, Homo sapien
  misc_feature (1)...(195): n = A,T,C or G
acagttttttatanatatcgacattgccggcacttgtgttcagtttcataaagctggtggatccgctgtcatccactattccttggctagagtaaaaattattcttatagcccatgtccctgcaggccgcccgcccgtagttctcgttccagtcgtcttggcacacagggtgccaggacttcctctgagatgagt

SEQ ID NO: 166 - DNA, 383 bp, Homo sapien
  misc_feature (1)...(383): n = A,T,C or G
acatcttagtagtgtggcacatcagggggccatcagggtcacagtcactcatagcctcgccgaggtcggagtccacaccaccggtgtaggtgtgctcaatcttgggcttggcgcccacctttggagaagggatatgctgcacacacatgtccacaaagcctgtgaactcgccaaagaatttttgcagaccagcctgagcaaggggcggatgttcagcttcagctcctccttcgtcaggtggatgccaacctcgtctanggtccgtgggaagctggtgtccacntcacctacaacctgggcgangatcttataaagaggctccnagataaactccacgaaacttctctgggagctgctagtnggggcctttttggtgaactttc

SEQ ID NO: 167 - DNA, 247 bp, Homo sapien
  misc_feature (1)...(247): n = A,T,C or G
acagagccagaccttggccataaatgaancagagattaagactaaaccccaagtcganattggagcagaaactggagcaagaagtgggcctggggctgaagtagagaccaaggccactgctatanccatacacagagccaactctcaggccaaggcnatggttggggcaganccagagactcaatctgantccaaagtggtggctggaacactggtcatgacanaggcagtgactctgactgangtc

SEQ ID NO: 168 - DNA, 273 bp, Homo sapien
  misc_feature (1)...(273): n = A,T,C or G
acttctaagttttctagaagtggaaggattgtantcatcctgaaaatgggtttacttcaaaatccctcanccttgttcttcacnactgtctatactganagtgtcatgtttccacaaagggctgacacctgagcctgnattttcactcatccctgagaagccctttccagtagggtgggcaattcccaacttccttgccacaagcttcccaggctttctcccctggaaaactccagcttgagtcccagatacactcatgggctgccctgggca

SEQ ID NO: 169 - DNA, 431 bp, Homo sapien
  misc_feature (1)...(431): n = A,T,C or G
acagccttggcttccccaaactccacagtctcagtgcagaaagatcatcttccagcagtcagctcagaccagggtcaaaggatgtgacatcaacagtttctggtttcagaacaggttctactactgtcaaatgaccccccatacttcctcaaaggctgtggtaagttttgcacaggtgagggcagcagaaagggggtanttactgatggacaccatcttctctgtatactccacactgaccttgccatgggcaaaggcccctaccacaaaaacaataggatcactgctgggcaccagctcacgcacatcactgacaaccgggatggaaaaagaantgccaactttcatacatccaactggaaagtgatctgatactggattcttaattaccttcaaaagcttctgggggccatcagctgctcgaacactga

SEQ ID NO: 170 - DNA, 266 bp, Homo sapien
  misc_feature (1)...(266): n = A,T,C or G
acctgtgggctgggctgttatgcctgtgccggctgctgaaagggagttcagaggtggagctcaaggagctctgcaggcattttgccaancctctccanagcanagggagcaacctacactccccgctagaaagacaccagattggagtcctgggagggggagttggggtgggcatttgatgtatacttgtcacctgaatgaangagccagagaggaangagacgaanatganattggccttcaaagctaggggtctggcaggtgga

SEQ ID NO: 171 - DNA, 1248 bp, Homo sapien
  misc_feature (1)...(1248): n = A,T,C or G
ggcagccaaatcataaacggcgaggactgcagcccgcactcgcagccctggcaggcggcactggtcatggaaaacgaattgttctgctcgggcgtcctggtgcatccgcagtgggtgctgtcagccgcacactgtttccagaagtgagtgcagagctcctacaccatcgggctgggcctgcacagtcttgaggccgaccaagagccagggagccagatggtggaggccagcctctccgtacggcacccagagtacaacagacccttgctcgctaacgacctcatgctcatcaagttggacgaatccgtgtccgagtctgacaccatccggagcatcagcattgcttcgcagtgccctaccgcggggaactcttgcctcgtttctggctggggtctgctggcgaacggcagaatgcctaccgtgctgcagtgcgtgaacgtgtcggtggtgtctgaggaggtctgcagtaagctctatgacccgctgtaccaccccagcatgttctgcgccggcggagggcaagaccagaaggactcctgcaacggtgactctggggggcccctgatctgcaacgggtacttgcagggccttgtgtctttcggaaaagccccgtgtggccaagttggcgtgccaggtgtctacaccaacctctgcaaattcactgagtggatagagaaaaccgtccaggccagttaactctggggactgggaacccatgaaattgacccccaaatacatcctgcggaaggaattcaggaatatctgttcccagcccctcctccctcaggcccaggagtccaggcccccagcccctcctccctcaaaccaagggtacagatccccagcccctcctccctcagacccaggagtccagaccccccagcccctcctccctcagacccaggagtccagcccctcctccctcagacccaggagtccagaccccccagcccctcctccctcagacccaggggtccaggcccccaacccctcctccctcagactcagaggtccaagcccccaacccntcattccccagacccagaggtccaggtcccagcccctcntccctcagacccagcggtccaatgccacctagactntccctgtacacagtgcccccttgtggcacgttgacccaaccttaccagttggtttttcatttttngtccctttcccctagatccagaaataaagtttaagagaagngcaaaaaaaaaaaaaaaaaaaaaaaaaaaaaaaaaaaaa

SEQ ID NO: 172 - protein, 159 aa, Homo sapien
  VARIANT (1)...(159): Xaa = Any Amino Acid
MVEASLSVRHPEYNRPLLANDLMLIKLDESVSESDTIRSISIASQCPTAGNSCLVSGWGLLANGRMPTVLQCVNVSVVSEEVCSKLYDPLYHPSMFCAGGGQXQXDSCNGDSGGPLICNGYLQGLVSFGKAPCGQVGVPGVYTNLCKFTEWIEKTVQAS

SEQ ID NO: 173 - DNA, 1265 bp, Homo sapien
  misc_feature (1)...(1265): n = A,T,C or G
ggcagcccgcactcgcagccctggcaggcggcactggtcatggaaaacgaattgttctgctcgggcgtcctggtgcatccgcagtgggtgctgtcagccgcacactgtttccagaactcctacaccatcgggctgggcctgcacagtcttgaggccgaccaagagccagggagccagatggtggaggccagcctctccgtacggcacccagagtacaacagacccttgctcgctaacgacctcatgctcatcaagttggacgaatccgtgtccgagtctgacaccatccggagcatcagcattgcttcgcagtgccctaccgcggggaactcttgcctcgtttctggctggggtctgctggcgaacggtgagctcacgggtgtgtgtctgccctcttcaaggaggtcctctgcccagtcgcgggggctgacccagagctctgcgtcccaggcagaatgcctaccgtgctgcagtgcgtgaacgtgtcggtggtgtctgaggaggtctgcagtaagctctatgacccgctgtaccaccccagcatgttctgcgccggcggagggcaagaccagaaggactcctgcaacggtgactctggggggcccctgatctgcaacgggtacttgcagggccttgtgtctttcggaaaagccccgtgtggccaagttggcgtgccaggtgtctacaccaacctctgcaaattcactgagtggatagagaaaaccgtccaggccagttaactctggggactgggaacccatgaaattgacccccaaatacatcctgcggaaggaattcaggaatatctgttcccagcccctcctccctcaggcccaggagtccaggcccccagcccctcctccctcaaaccaagggtacagatccccagcccctcctccctcagacccaggagtccagaccccccagcccctcctccctcagacccaggagtccagcccctcctccntcagacccaggagtccagaccccccagcccctcctccctcagacccaggggttgaggcccccaacccctcctccttcagagtcagaggtccaagcccccaacccctcgttccccagacccagaggtnnaggtcccagcccctcttccntcagacccagnggtccaatgccacctagattttccctgnacacagtgcccccttgtggnangttgacccaaccttaccagttggtttttcatttttngtccctttcccctagatccagaaataaagtttaagagangngcaaaaaaaaaa

SEQ ID NO: 174 - DNA, 1459 bp, Homo sapien
  misc_feature (1)...(1459): n = A,T,C or G
ggtcagccgcacactgtttccagaagtgagtgcagagctcctacaccatcgggctgggcctgcacagtcttgaggccgaccaagagccagggagccagatggtggaggccagcctctccgtacggcacccagagtacaacagacccttgctcgctaacgacctcatgctcatcaagttggacgaatccgtgtccgagtctgacaccatccggagcatcagcattgcttcgcagtgccctaccgcggggaactcttgcctcgtttctggctggggtctgctggcgaacggtgagctcacgggtgtgtgtctgccctcttcaaggaggtcctctgcccagtcgcgggggctgacccagagctctgcgtcccaggcagaatgcctaccgtgctgcagtgcgtgaacgtgtcggtggtgtctgangaggtctgcantaagctctatgacccgctgtaccaccccancatgttctgcgccggcggagggcaagaccagaaggactcctgcaacgtgagagaggggaaaggggagggcaggcgactcagggaagggtggagaagggggagacagagacacacagggccgcatggcgagatgcagagatggagagacacacagggagacagtgacaactagagagagaaactgagagaaacagagaaataaacacaggaataaagagaagcaaaggaagagagaaacagaaacagacatggggaggcagaaacacacacacatagaaatgcagttgaccttccaacagcatggggcctgagggcggtgacctccacccaatagaaaatcctcttataacttttgactccccaaaaacctgactagaaatagcctactgttgacggggagccttaccaataacataaatagtcgatttatgcatacgttttatgcattcatgatatacctttgttggaattttttgatatttctaagctacacagttcgtctgtgaatttttttaaattgttgcaactctcctaaaatttttctgatgtgtttattgaaaaaatccaagtataagtggacttgtgcattcaaaccagggttgttcaagggtcaactgtgtacccagagggaaacagtgacacagattcatagaggtgaaacacgaagagaaacaggaaaaatcaagactctacaaagaggctgggcagggtggctcatgcctgtaatcccagcactttgggaggcgaggcaggcagatcacttgaggtaaggagttcaagaccagcctggccaaaatggtgaaatcctgtctgtactaaaaatacaaaagttagctggatatggtggcaggcgcctgtaatcccagctacttgggaggctgaggcaggagaattgcttgaatatgggaggcagaggttgaagtgagttgagatcacaccactatactccagctggggcaacagagtaagactctgtctcaaaaaaaaaaaaaaaaaa

SEQ ID NO: 175 - DNA, 1167 bp, Homo sapien
  misc_feature (1)...(1167): n = A,T,C or G
gcgcagccctggcaggcggcactggtcatggaaaacgaattgttctgctcgggcgtcctggtgcatccgcagtgggtgctgtcagccgcacactgtttccagaactcctacaccatcgggctgggcctgcacagtcttgaggccgaccaagagccagggagccagatggtggaggccagcctctccgtacggcacccagagtacaacagactcttgctcgctaacgacctcatgctcatcaagttggacgaatccgtgtccgagtctgacaccatccggagcatcagcattgcttcgcagtgccctaccgcggggaactcttgcctcgtntctggctggggtctgctggcgaacggcagaatgcctaccgtgctgcactgcgtgaacgtgtcggtggtgtctgaggangtctgcagtaagctctatgacccgctgtaccaccccagcatgttctgcgccggcggagggcaagaccagaaggactcctgcaacggtgactctggggggcccctgatctgcaacgggtacttgcagggccttgtgtctttcggaaaagccccgtgtggccaacttggcgtgccaggtgtctacaccaacctctgcaaattcactgagtggatagagaaaaccgtccagnccagttaactctggggactgggaacccatgaaattgacccccaaatacatcctgcggaangaattcaggaatatctgttcccagcccctcctccctcaggcccaggagtccaggcccccagcccctcctccctcaaaccaagggtacagatccccagcccctcctccctcagacccaggagtccagaccccccagcccctcntccntcagacccaggagtccagcccctcctccntcagacgcaggagtccagaccccccagcccntcntccgtcagacccaggggtgcaggcccccaacccctcntccntcagagtcagaggtccaagcccccaacccctcgttccccagacccagaggtncaggtcccagcccctcctccctcagacccagcggtccaatgccacctagantntccctgtacacagtgcccccttgtggcangttgacccaaccttaccagttggtttttcattttttgtccctttcccctagatccagaaataaagtntaagagaagcgcaaaaaaa

SEQ ID NO: 176 - protein, 205 aa, Homo sapien
  VARIANT (1)...(205): Xaa = Any Amino Acid
MENELFCSGVLVHPQWVLSAAHCFQNSYTIGLGLHSLEADQEPGSQMVEASLSVRHPEYNRLLLANDLMLIKLDESVSESDTIRSISIASQCPTAGNSCLVSGWGLLANGRMPTVLHCVNVSVVSEXVCSKLYDPLYHPSMFCAGGGQDQKDSCNGDSGGPLICNGYLQGLVSFGKAPCGQLGVPGVYTNLCKFTEWIEKTVQXS

SEQ ID NO: 177 - DNA, 1119 bp, Homo sapien
gcgcactcgcagccctggcaggcggcactggtcatggaaaacgaattgttctgctcgggcgtcctggtgcatccgcagtgggtgctgtcagccgcacactgtttccagaactcctacaccatcgggctgggcctgcacagtcttgaggccgaccaagagccagggagccagatggtggaggccagcctctccgtacggcacccagagtacaacagacccttgctcgctaacgacctcatgctcatcaagttggacgaatccgtgtccgagtctgacaccatccggagcatcagcattgcttcgcagtgccctaccgcggggaactcttgcctcgtttctggctggggtctgctggcgaacgatgctgtgattgccatccagtcccagactgtgggaggctgggagtgtgagaagctttcccaaccctggcagggttgtaccatttcggcaacttccagtgcaaggacgtcctgctgcatcctcactgggtgctcactactgctcactgcatcacccggaacactgtgatcaactagccagcaccatagttctccgaagtcagactatcatgattactgtgttgactgtgctgtctattgtactaaccatgccgatgtttaggtgaaattagcgtcacttggcctcaaccatcttggtatccagttatcctcactgaattgagatttcctgcttcagtgtcagccattcccacataatttctgacctacagaggtgagggatcatatagctcttcaaggatgctggtactcccctcacaaattcatttctcctgttgtagtgaaaggtgcgccctctggagcctcccagggtgggtgtgcaggtcacaatgatgaatgtatgatcgtgttcccattacccaaagcctttaaatccctcatgctcagtacaccagggcaggtctagcatttcttcatttagtgtatgctgtccattcatgcaaccacctcaggactcctggattctctgcctagttgagctcctgcatgctgcctccttggggaggtgagggagagggcccatggttcaatgggatctgtgcagttgtaacacattaggtgcttaataaacagaagctgtgatgttaaaaaaaaaaaaaaa

SEQ ID NO: 178 - protein, 164 aa, Homo sapien
  VARIANT (1)...(164): Xaa = Any Amino Acid
MENELFCSGVLVHPQWVLSAAHCFQNSYTIGLGLHSLEADQEPGSQMVEASLSVRHPEYNRPLLANDLMLIKLDESVSESDTIRSISIASQCPTAGNSCLVSGWGLLANDAVIAIQSXTVGGWECEKLSQPWQGCTISATSSARTSCCILTGCSLLLTASPGTL

SEQ ID NO: 179 - DNA, 250 bp, Homo sapien
ctggagtgccttggtgtttcaagcccctgcaggaagcagaatgcaccttctgaggcacctccagctgcccccggccgggggatgcgaggctcggagcacccttgcccggctgtgattgctgccaggcactgttcatctcagcttttctgtccctttgctcccggcaagcgcttctgctgaaagttcatatctggagcctgatgtcttaacgaataaaggtcccatgctccacccgaaaaaaaaaaaaaaa

SEQ ID NO: 180 - DNA, 202 bp, Homo sapien
actagtccagtgtggtggaattccattgtgttgggcccaacacaatggctacctttaacatcacccagaccccgcccctgcccgtgccccacgctgctgctaacgacagtatgatgcttactctgctactcggaaactatttttatgtaattaatgtatgctttcttgtttataaatgcctgatttaaaaaaaaaaaaaaaa

SEQ ID NO: 181 - DNA, 558 bp, Homo sapien
  misc_feature (1)...(558): n = A,T,C or G
tccytttgktnaggtttkkgagacamccckagacctwaanctgtgtcacagacttcynggaatgtttaggcagtgctagtaatttcytcgtaatgattctgttattactttcctnattctttattcctctttcttctgaagattaatgaagttgaaaattgaggtggataaatacaaaaaggtagtgtgatagtataagtatctaagtgcagatgaaagtgtgttatatatatccattcaaaattatgcaagttagtaattactcagggttaactaaattactttaatatgctgttgaacctactctgttccttggctagaaaaaattataaacaggactttgttagtttgggaagccaaattgataatattctatgttctaaaagttgggctatacataaattattaagaaatatggawttttattcccaggaatatggkgttcattttatgaatattacscrggatagawgtwtgagtaaaaycagttttggtwaataygtwaatatgtcmtaaataaacaakgctttgacttatttccaaaaaaaaaaaaaaaaa

SEQ ID NO: 182 - DNA, 479 bp, Homo sapien
  misc_feature (1)...(479): n = A,T,C or G
acagggwttkgrggatgctaagsccccrgarwtygtttgatccaaccctggcttwttttcagaggggaaaatggggcctagaagttacagmscatytagytggtgcgmtggcacccctggcstcacacagastcccgagtagctgggactacaggcacacagtcactgaagcaggccctgttwgcaattcacgttgccacctccaacttaaacattcttcatatgtgatgtccttagtcactaaggttaaactttcccacccagaaaaggcaacttagataaaatcttagagtactttcatactmttctaagtcctcttccagcctcactkkgagtcctmcytgggggttgataggaantntctcttggctttctcaataaartctctatycatctcatgtttaatttggtacgcataraawtgstgaraaaattaaaatgttctggttymactttaaaaaraaaaaaaaaaaaaaaaa

SEQ ID NO: 183 - DNA, 384 bp, Homo sapien
aggcgggagcagaagctaaagccaaagcccaagaagagtggcagtgccagcactggtgccagtaccagtaccaataacagtgccagtgccagtgccagcaccagtggtggcttcagtgctggtgccagcctgaccgccactctcacatttgggctcttcgctggccttggtggagctggtgccagcaccagtggcagctctggtgcctgtggtttctcctacaagtgagattttagatattgttaatcctgccagtctttctcttcaagccagggtgcatcctcagaaacctactcaacacagcactctaggcagccactatcaatcaattgaagttgacactctgcattaratctatttgccatttcaaaaaaaaaaaaaaaa

SEQ ID NO: 184 - DNA, 496 bp, Homo sapien
  misc_feature (1)...(496): n = A,T,C or G
accgaattgggaccgctggcttataagcgatcatgtyyntccrgtatkacctcaacgagcagggagatcgagtctatacgctgaagaaatttgacccgatgggacaacagacctgctcagcccatcctgctcggttctccccagatgacaaatactctsgacaccgaatcaccatcaagaaacgcttcaaggtgctcatgacccagcaaccgcgccctgtcctctgagggtcccttaaactgatgtcttttctgccacctgttacccctcggagactccgtaaccaaactcttcggactgtgagccctgatgcctttttgccagccatactctttggcatccagtctctcgtggcgattgattatgcttgtgtgaggcaatcatggtggcatcacccataaagggaacacatttgacttttttttctcatattttaaattactacmagawtattwmagawwaaatgawttgaaaaactsttaaaaaaaaaaaaaaa

SEQ ID NO: 185 - DNA, 384 bp, Homo sapien
gctggtagcctatggcgkggcccacggaggggctcctgaggccacggracagtgacttcccaagtatcytgcgcsgcgtcttctaccgtccctacctgcagatcttcgggcagattccccaggaggacatggacgtggccctcatggagcacagcaactgytcgtcggagcccggcttctgggcacaccctcctggggcccaggcgggcacctgcgtctcccagtatgccaactggctggtggtgctgctcctcgtcatcttcctgctcgtggccaacatcctgctggtcaacttgctcattgccatgttcagttacacattcggcaaagtacagggcaacagcgatctctactgggaaggcgcagcgttaccgcctcatccgg

SEQ ID NO: 186 - DNA, 577 bp, Homo sapien
  misc_feature (1)...(577): n = A,T,C or G
gagttagctcctccacaaccttgatgaggtcgtctgcagtggcctctcgcttcataccgctnccatcgtcatactgtaggtttgccaccacytcctggcatcttggggcggcntaatattccaggaaactctcaatcaagtcaccgtcgatgaaacctgtgggctggttctgtcttccgctcggtgtgaaaggatctcccagaaggagtgctcgatcttccccacacttttgatgactttattgagtcgattctgcatgtccagcaggaggttgtaccagctctctgacagtgaggtcaccagccctatcatgccgttgamcgtgccgaagarcaccgagccttgtgtgggggkkgaagtctcacccagattctgcattaccagagagccgtggcaaaagacattgacaaactcgcccaggtggaaaaagamcamctcctggargtgctngccgctcctcgtcmgttggtggcagcgctwtccttttgacacacaaacaagttaaaggcattttcagcccccagaaanttgtcatcatccaagatntcgcacagcactnatccagttgggattaaat

SEQ ID NO: 187 - DNA, 534 bp, Homo sapien
  misc_feature (1)...(534): n = A,T,C or G
aacatcttcctgtataatgctgtgtaatatcgatccgatnttgtctgstgagaatycatwactkggaaaagmaacattaaagcctggacactggtattaaaattcacaatatgcaacactttaaacagtgtgtcaatctgctcccyynactttgtcatcaccagtctgggaakaagggtatgccctattcacacctgttaaaagggcgctaagcatttttgattcaacatctttttttttgacacaagtccgaaaaaagcaaaagtaaacagttatyaatttgttagccaattcactttcttcatgggacagagccatytgatttaaaaagcaaattgcataatattgagcttygggagctgatatttgagcggaagagtagcctttctacttcaccagacacaactccctttcatattgggatgttnacnaaagtwatgtctctwacagatgggatgcttttgtggcaattctgttctgaggatctcccagtttatttaccacttgcacaagaaggcgttttcttcctcaggc

SEQ ID NO: 188 - DNA, 761 bp, Homo sapien
  misc_feature (1)...(761): n = A,T,C or G
agaaaccagtatctctnaaaacaacctctcataccttgtggacctaattttgtgtgcgtgtgtgtgtgcgcgcatattatatagacaggcacatcttttttacttttgtaaaagcttatgcctctttggtatctatatctgtgaaagttttaatgatctgccataatgtcttggggacctttgtcttctgtgtaaatggtactagagaaaacacctatnttatgagtcaatctagttngttttattcgacatgaaggaaatttccagatnacaacactnacaaactctccctkgackargggggacaaagaaaagcaaaactgamcataaraaacaatwacctggtgagaarttgcataaacagaaatwrggtagtatattgaarnacagcatcattaaarmgttwtkttwttctcccttgcaaaaaacatgtacngacttcccgttgagtaatgccaagttgttttttttatnataaaacttgcccttcattacatgtttnaaagtggtgtggtgggccaaaatattgaaatgatggaactgactgataaagctgtacaaataagcagtgtgcctaacaagcaacacagtaatgttgacatgcttaattcacaaatgctaatttcattataaatgtttgctaaaatacactttgaactatttttctgtnttcccagagctgagatnttagattttatgtagtatnaagtgaaaaantacgaaaataataacattgaagaaaaananaaaaaanaaaaaaa

SEQ ID NO: 189 - DNA, 482 bp, Homo sapien
  misc_feature (1)...(482): n = A,T,C or G
tttttttttttttgccgatnctactattttattgcaggangtgggggtgtatgcaccgcacaccggggctatnagaagcaagaaggaaggagggagggcacagccccttgctgagcaacaaagccgcctgctgccttctctgtctgtctcctggtgcaggcacatggggagaccttccccaaggcaggggccaccagtccaggggtgggaatacagggggtgggangtgtgcataagaagtgataggcacaggccacccggtacagacccctcggctcctgacaggtngatttcgaccaggtcattgtgccctgcccaggcacagcgtanatctggaaaagacagaatgctttccttttcaaatttggctngtcatngaangggcanttttccaanttnggctnggtcttggtacncttggttcggcccagctccncgtccaaaaantattcacccnnctccnaattgcttgcnggnccccc

SEQ ID NO: 190 - DNA, 471 bp, Homo sapien
  misc_feature (1)...(471): n = A,T,C or G
ttttttttttttttaaaacagtttttcacaacaaaatttattagaagaatagtggttttgaaaactctcgcatccagtgagaactaccatacaccacattacagctnggaatgtnctccaaatgtctggtcaaatgatacaatggaaccattcaatcttacacatgcacgaaagaacaagcgcttttgacatacaatgcacaaaaaaaaaaggggggggggaccacatggattaaaattttaagtactcatcacatacattaagacacagttctagtccagtcnaaaatcagaactgcnttgaaaaatttcatgtatgcaatccaaccaaagaacttnattggtgatcatgantnctctactacatcnaccttgatcattgccaggaacnaaaagttnaaancacncngtacaaaaanaatctgtaattnanttcaacctccgtacngaaaaatnttnnttatacactccc

SEQ ID NO: 191 - DNA, 402 bp, Homo sapien
  misc_feature (1)...(402): n = A,T,C or G
gagggattgaaggtctgttctastgtcggmctgttcagccaccaactctaacaagttgctgtcttccactcactgtctgtaagctttttaacccagacwgtatcttcataaatagaacaaattcttcaccagtcacatcttctaggacctttttggattcagttagtataagctcttccacttcctttgttaagacttcatctggtaaagtcttaagttttgtagaaaggaattyaattgctcgttctctaacaatgtcctctccttgaagtatttggctgaacaacccacctaaagtccctttgtgcatccattttaaatatacttaatagggcattgktncactaggttaaattctgcaagagtcatctgtctgcaaaagttgcgttagtatatctgcca

SEQ ID NO: 192 - DNA, 601 bp, Homo sapien
  misc_feature (1)...(601): n = A,T,C or G
gagctcggatccaataatctttgtctgagggcagcacacatatncagtgccatggnaactggtctaccccacatgggagcagcatgccgtagntatataaggtcattccctgagtcagacatgcytytttgaytaccgtgtgccaagtgctggtgattctyaacacacytccatcccgytcttttgtggaaaaactggcacttktctggaactagcargacatcacttacaaattcacccacgagacacttgaaaggtgtaacaaagcgaytcttgcattgctttttgtccctccggcaccagttgtcaatactaacccgctggtttgcctccatcacatttgtgatctgtagctctggatacatctcctgacagtactgaagaacttcttcttttgtttcaaaagcarctcttggtgcctgttggatcaggttcccatttcccagtcygaatgttcacatggcatatttwacttcccacaaaacattgcgatttgaggctcagcaacagcaaatcctgttccggcattggctgcaagagcctcgatgtagccggccagcgccaaggcaggcgccgtgagccccaccagcagcagaagcag

SEQ ID NO: 193 - DNA, 608 bp, Homo sapien
  misc_feature (1)...(608): n = A,T,C or G
atacagcccanatcccaccacgaagatgcgcttgttgactgagaacctgatgcggtcactggtcccgctgtagccccagcgactctccacctgctggaagcggttgatgctgcactcyttcccaacgcaggcagmagcgggsccggtcaatgaactccaytcgtggcttggggtkgacggtkaagtgcaggaagaggctgaccacctcgcggtccaccaggatgcccgactgtgcgggacctgcagcgaaactcctcgatggtcatgagcgggaagcgaatgaggcccagggccttgcccagaaccttccgcctgttctctggcgtcacctgcagctgctgccgctgacactcggcctcggaccagcggacaaacggcrttgaacagccgcacctcacggatgcccagtgtgtcgcgctccaggammgscaccagcgtgtccaggtcaatgtcggtgaagccctccgcgggtratggcgtctgcagtgtttttgtcgatgttctccaggcacaggctggccagctgcggttcatcgaagagtcgcgcctgcgtgagcagcatgaaggcgttgtcggctcgcagttcttcttcaggaactccacgcaat

SEQ ID NO: 194 - DNA, 392 bp, Homo sapien
  misc_feature (1)...(392): n = A,T,C or G
gaacggctggaccttgcctcgcattgtgcttgctggcagggaataccttggcaagcagytccagtccgagcagccccagaccgctgccgcccgaagctaagcctgcctctggccttcccctccgcctcaatgcagaaccagtagtgggagcactgtgtttagagttaagagtgaacactgtttgattttacttgggaatttcctctgttatatagcttttcccaatgctaatttccaaacaacaacaacaaaataacatgtttgcctgttaagttgtataaaagtaggtgattctgtatttaaagaaaatattactgttacatatactgcttgcaatttctgtatttattgktnctstggaaataaatatagttattaaaggttgtcantcc

SEQ ID NO: 195 - DNA, 502 bp, Homo sapien
  misc_feature (1)...(502): n = A,T,C or G
ccsttkgaggggtkaggkyccagttyccgagtggaagaaacaggccaggagaagtgcgtgccgagctgaggcagatgttcccacagtgacccccagagccstgggstatagtytctgacccctcncaaggaaagaccacsttctggggacatgggctggagggcaggacctagaggcaccaagggaaggccccattccggggstgttccccgaggaggaagggaaggggctctgtgtgccccccasgaggaagaggccctgagtcctgggatcagacaccccttcacgtgtatccccacacaaatgcaagctcaccaaggtcccctctcagtccccttccstacaccctgamcggccactgscscacacccacccagagcacgccacccgccatggggartgtgctcaaggartcgcngggcarcgtggacatctngtcccagaagggggcagaatctccaataganggactgarcmsttgctnanaaaaaaaaanaaaaaa

SEQ ID NO: 196 - DNA, 665 bp, Homo sapien
  misc_feature (1)...(665): n = A,T,C or G
ggttacttggtttcattgccaccacttagtggatgtcatttagaaccattttgtctgctccctctggaagccttgcgcagagcggactttgtaattgttggagaataactgctgaattttwagctgtttkgagttgattsgcaccactgcacccacaacttcaatatgaaaacyawttgaactwatttattatcttgtgaaaagtataacaatgaaaattttgttcatactgtattkatcaagtatgatgaaaagcaawagatatatattcttttattatgttaaattatgattgccattattaatcggcaaaatgtggagtgtatgttcttttcacagtaatatatgccttttgtaacttcacttggttattttattgtaaatgarttacaaaattcttaatttaagaraatggtatgtwatatttatttcattaatttctttcctkgtttacgtwaattttgaaaagawtgcatgatttcttgacagaaatcgatcttgatgctgtggaagtagtttgacccacatccctatgagtttttcttagaatgtataaaggttgtagcccatcnaacttcaaagaaaaaaatgaccacatactttgcaatcaggctgaaatgtggcatgctnttctaattccaactttataaactagcaaanaagtg

SEQ ID NO: 197 - DNA, 492 bp, Homo sapien
  misc_feature (1)...(492): n = A,T,C or G
ttttntttttttttttttgcaggaaggattccatttattgtggatgcattttcacaatatatgtttattggagcgatccattatcagtgaaaagtatcaagtgtttataanatttttaggaaggcagattcacagaacatgctngtcngcttgcagttttacctcgtanagatnacagagaattatagtcnaaccagtaaacnaggaatttacttttcaaaagattaaatccaaactgaacaaaattctaccctgaaacttactccatccaaatattggaataanagtcagcagtgatacattctcttctgaactttagattttctagaaaaatatgtaatagtgatcaggaagagctcttgttcaaaagtacaacnaagcaatgttcccttaccataggccttaattcaaactttgatccatttcactcccatcacgggagtcaatgctacctgggacacttgtattttgttcatnctgancntggcttaa

SEQ ID NO: 198 - DNA, 478 bp, Homo sapien
  misc_feature (1)...(478): n = A,T,C or G
tttnttttgnatttcantctgtannaantattttcattatgtttattanaaaaatatnaatgtntccacnacaaatcatnttacntnagtaagaggccanctacattgtacaacatacactgagtatattttgaaaaggacaagtttaaagtanacncatattgccgancatancacatttatacatggcttgattgatatttagcacagcanaaactgagtgagttaccagaaanaaatnatatatgtcaatcngatttaagatacaaaacagatcctatggtacatancatcntgtaggagttgtggctttatgtttactgaaagtcaatgcagttcctgtacaaagagatggccgtaagcattctagtacctctactccatggttaagaatcgtacacttatgtttacatatgtncagggtaagaattgtgttaagtnaanttatggagaggtccangagaaaaatttgatncaa

SEQ ID NO: 199 - DNA, 482 bp, Homo sapien
  misc_feature (1)...(482): n = A,T,C or G
agtgacttgtcctccaacaaaaccccttgatcaagtttgtggcactgacaatcagacctatgctagttcctgtcatctattcgctactaaatgcagactggaggggaccaaaaaggggcatcaactccagctggattattttggagcctgcaaatctattcctacttgtacggactttgaagtgattcagtttcctctacggatgagagactggctcaagaatatcctcatgcagctttatgaagccnactctgaacacgctggttatctnagatgagaancagagaaataaagtcnagaaaatttacctggangaaaagaggctttnggctggggaccatcccattgaaccttctcttaanggactttaagaanaaactaccacatgtntgtngtatcctggtgccnggccgtttantgaacntngacnncacccttntggaatanantcttgacngcntcctgaacttgctcctctgcga

SEQ ID NO: 200 - DNA, 270 bp, Homo sapien
  misc_feature (1)...(270): n = A,T,C or G
cggccgcaagtgcaactccagctggggccgtgcggacgaagattctgccagcagttggtccgactgcgacgacggcggcggcgacagtcgcaggtgcagcgcgggcgcctggggtcttgcaaggctgagctgacgccgcagaggtcgtgtcacgtcccacgaccttgacgccgtcggggacagccggaacagagcccggtgaangcgggaggcctcggggagcccctcgggaagggcggcccgagagatacgcaggtgcaggtggccgcc

SEQ ID NO: 201 - DNA, 419 bp, Homo sapien
  misc_feature (1)...(419): n = A,T,C or G
ttttttttttttttggaatctactgcgagcacagcaggtcagcaacaagtttattttgcagctagcaaggtaacagggtagggcatggttacatgttcaggtcaacttcctttgtcgtggttgattggtttgtctttatgggggcggggtggggtaggggaaancgaagcanaantaacatggagtgggtgcaccctccctgtagaacctggttacnaaagcttggggcagttcacctggtctgtgaccgtcattttcttgacatcaatgttattagaagtcaggatatcttttagagagtccactgtntctggagggagattagggtttcttgccaanatccaancaaaatccacntgaaaaagttggatgatncangtacngaataccganggcatanttctcatantcggtggcca

SEQ ID NO: 202 - DNA, 509 bp, Homo sapien
  misc_feature (1)...(509): n = A,T,C or G
tttntttttttttttttttttttttttttttttttttttttttttttttttttttttttttggcacttaatccatttttatttcaaaatgtctacaaantttnaatncnccattatacnggtnattttncaaaatctaaannttattcaaatntnagccaaantccttacncaaatnnaatacncncaaaaatcaaaaatatacntntctttcagcaaacttngttacataaattaaaaaaatatatacggctggtgttttcaaagtacaattatcttaacactgcaaacatntttnnaaggaactaaaataaaaaaaaacactnccgcaaaggttaaagggaacaacaaattcnttttacaacancnncnattataaaaatcatatctcaaatcttaggggaatatatacttcacacngggatcttaacttttactncactttgtttatttttttanaaccattgtnttgggcccaacacaatggnaatnccnccncnctggactagt

SEQ ID NO: 203 - DNA, 583 bp, Homo sapien
  misc_feature (1)...(583): n = A,T,C or G
ttttttttttttttttttgacccccctcttataaaaaacaagttaccattttattttacttacacatatttattttataattggtattagatattcaaaaggcagcttttaaaatcaaactaaatggaaactgccttagatacataattcttaggaattagcttaaaatctgcctaaagtgaaaatcttctctagctcttttgactgtaaatttttgactcttgtaaaacatccaaattcatttttcttgtctttaaaattatctaatctttccattttttccctattccaagtcaatttgcttctctagcctcatttcctagctcttatctactattagtaagtggcttttttcctaaaagggaaaacaggaagaganaatggcacacaaaacaaacattttatattcatatttctacctacgttaataaaatagcattttgtgaagccagctcaaaagaaggcttagatccttttatgtccattttagtcactaaacgatatcnaaagtgccagaatgcaaaaggtttgtgaacatttattcaaaagctaatataagatatttcacatactcatctttctg

SEQ ID NO: 204 - DNA, 589 bp, Homo sapien
  misc_feature (1)...(589): n = A,T,C or G
ttttttttntttttttttttttttttnctcttctttttttttganaatgaggatcgagtttttcactctctagatagggcatgaagaaaactcatctttccagctttaaaataacaatcaaatctcttatgctatatcatattttaagttaaactaatgagtcactggcttatcttctcctgaaggaaatctgttcattcttctcattcatatagttatatcaagtactaccttgcatattgagaggtttttcttctctatttacacatatatttccatgtgaatttgtatcaaacctttattttcatgcaaactagaaaataatgtnttcttttgcataagagaagagaacaatatnagcattacaaaactgctcaaattgtttgttaagnttatccattataattagttnggcaggagctaatacaaatcacatttacngacnagcaataataaaactgaagtaccagttaaatatccaaaataattaaaggaacatttttagcctgggtataattagctaattcactttacaagcatttattnagaatgaattcacatgttattattccntagcccaacacaatgg

SEQ ID NO: 205 - DNA, 545 bp, Homo sapien
  misc_feature (1)...(545): n = A,T,C or G
tttttnttttttttttcagtaataatcagaacaatatttatttttatatttaaaattcatagaaaagtgccttacatttaataaaagtttgtttctcaaagtgatcagaggaattagatatngtcttgaacaccaatattaatttgaggaaaatacaccaaaatacattaagtaaattatttaagatcatagagcttgtaagtgaaaagataaaatttgacctcagaaactctgagcattaaaaatccactattagcaaataaattactatggacttcttgctttaattttgtgatgaatatggggtgtcactggtaaaccaacacattctgaaggatacattacttagtgatagattcttatgtactttgctanatnacgtggatatgagttgacaagtttctctttcttcaatcttttaaggggcngangaaatgaggaagaaaagaaaaggattacgcatactgttctttctatnggaaggattagatatgtttcctttgccaatattaaaaaaataataatgtttactactagtgaaaccc

SEQ ID NO: 206 - DNA, 487 bp, Homo sapien
  misc_feature (1)...(487): n = A,T,C or G
ttttttttttttttttagtcaagtttctnatttttattataattaaagtcttggtcatttcatttattagctctgcaacttacatatttaaattaaagaaacgttnttagacaactgtnacaatttataaatgtaaggtgccattattgagtanatatattcctccaagagtggatgtgtcccttctcccaccaactaatgaancagcaacattagtttaattttattagtagatnatacactgctgcaaacgctaattctcttctccatccccatgtngatattgtgtatatgtgtgagttggtnagaatgcatcancaatctnacaatcaacagcaagatgaagctaggcntgggctttcggtgaaaatagactgtgtctgtctgaatcaaatgatctgacctatcctcggtggcaagaactcttcgaaccgcttcctcaaaggcngctgccacatttgtggcntctnttgcacttgtttcaaaa

SEQ ID NO: 207 - DNA, 332 bp, Homo sapien
  misc_feature (1)...(332): n = A,T,C or G
tgaattggctaaaagactgcatttttanaactagcaactcttatttctttcctttaaaaatacatagcattaaatcccaaatcctatttaaagacctgacagcttgagaaggtcactactgcatttataggaccttctggtggttctgctgttacntttgaantctgacaatccttganaatctttgcatgcagaggaggtaaaaggtattggattttcacagaggaanaacacagcgcagaaatgaaggggccaggcttactgagcttgtccactggagggctcatgggtgggacatggaaaagaaggcagcctaggccctggggagccca

SEQ ID NO: 208 - DNA, 524 bp, Homo sapien
  misc_feature (1)...(524): n = A,T,C or G
agggcgtggtgcggagggcgttactgttttgtctcagtaacaataaatacaaaaagactggttgtgttccggccccatccaaccacgaagttgatttctcttgtgtgcagagtgactgattttaaaggacatggagcttgtcacaatgtcacaatgtcacagtgtgaagggcacactcactcccgcgtgattcacatttagcaaccaacaatagctcatgagtccatacttgtaaatacttttggcagaatacttnttgaaacttgcagatgataactaagatccaagatatttcccaaagtaaatagaagtgggtcataatattaattacctgttcacatcagcttccatttacaagtcatgagcccagacactgacatcaaactaagcccacttagactcctcaccaccagtctgtcctgtcatcagacaggaggctgtcaccttgaccaaattctcaccagtcaatcatctatccaaaaaccattacctgatccacttccggtaatgcaccaccttggtga

SEQ ID NO: 209 - DNA, 159 bp, Homo sapien
gggtgaggaaatccagagttgccatggagaaaattccagtgtcagcattcttgctccttgtggccctctcctacactctggccagagataccacagtcaaacctggagccaaaaaggacacaaaggactctcgacccaaactgccccagaccctctcca

SEQ ID NO: 210 - DNA, 256 bp, Homo sapien
  misc_feature (1)...(256): n = A,T,C or G
actccctggcagacaaaggcagaggagagagctctgttagttctgtgttgttgaactgccactgaatttctttccacttggactattacatgccanttgagggactaatggaaaaacgtatggggagattttanccaatttangtntgtaaatggggagactggggcaggcgggagagatttgcagggtgnaaatggganggctggtttgttanatgaacagggacataggaggtaggcaccaggatgctaaatca

SEQ ID NO: 211 - DNA, 264 bp, Homo sapien
  misc_feature (1)...(264): n = A,T,C or G
acattgtttttttgagataaagcattgagagagctctccttaacgtgacacaatggaaggactggaacacatacccacatctttgttctgagggataattttctgataaagtcttgctgtatattcaagcacatatgttatatattattcagttccatgtttatagcctagttaaggagaggggagatacattcngaaagaggactgaaagaaatactcaagtnggaaaacagaaaaagaaaaaaaggagcaaatgagaagcct

SEQ ID NO: 212 - DNA, 328 bp, Homo sapien
  misc_feature (1)...(328): n = A,T,C or G
acccaaaaatccaatgctgaatatttggcttcattattcccanattctttgattgtcaaaggatttaatgttgtctcagcttgggcacttcagttaggacctaaggatgccagccggcaggtttatatatgcagcaacaatattcaagcgcgacaacaggttattgaacttgcccgccagttnaatttcattcccattgacttgggatccttatcatcagccagagagattgaaaatttacccctacnactctttactctctgganagggccagtggtggtagctataagcttggccacatttttttttcctttattcctttgtcaga

SEQ ID NO: 213 - DNA, 250 bp, Homo sapien
  misc_feature (1)...(250): n = A,T,C or G
acttatgagcagagcgacatatccnagtgtagactgaataaaactgaattctctccagtttaaagcattgctcactgaagggatagaagtgactgccaggagggaaagtaagccaaggctcattatgccaaagganatatacatttcaattctccaaacttcttcctcattccaagagttttcaatatttgcatgaacctgctgataanccatgttaanaaacaaatatctctctnaccttctcatcggt

SEQ ID NO: 214 - DNA, 444 bp, Homo sapien
  misc_feature (1)...(444): n = A,T,C or G
acccagaatccaatgctgaatatttggcttcattattcccagattctttgattgtcaaaggatttaatgttgtctcagcttgggcacttcagttaggacctaaggatgccagccggcaggtttatatatgcagcaacaatattcaagcgcgacaacaggttattgaacttgcccgccagttgaatttcattcccattgacttgggatccttatcatcagccanagagattgaaaatttacccctacgactctttactctctggagagggccagtggtggtagctataagcttggccacatttttttttcctttattcctttgtcagagatgcgattcatccatatgctanaaaccaacagagtgacttttacaaaattcctataganattgtgaataaaaccttacctatagttgccattactttgctctccctaatatacctc

SEQ ID NO: 215 - DNA, 366 bp, Homo sapien
  misc_feature (1)...(366): n = A,T,C or G
acttatgagcagagcgacatatccaagtgtanactgaataaaactgaattctctccagtttaaagcattgctcactgaagggatagaagtgactgccaggagggaaagtaagccaaggctcattatgccaaagganatatacatttcaattctccaaacttcttcctcattccaagagttttcaatatttgcatgaacctgctgataagccatgttgagaaacaaatatctctctgaccttctcatcggtaagcagaggctgtaggcaacatggaccatagcgaanaaaaaacttagtaatccaagctgttttctacactgtaaccaggtttccaaccaaggtggaaatctcctatacttggtgcc

SEQ ID NO: 216 - DNA, 260 bp, Homo sapien
  misc_feature (1)...(260): n = A,T,C or G
ctgtataaacagaactccactgcangagggagggccgggccaggagaatctccgcttgtccaagacaggggcctaaggagggtctccacactgctnntaagggctnttncatttttttattaataaaaagtnnaaaaggcctcttctcaacttttttcccttnggctggaaaatttaaaaatcaaaaatttcctnaagttntcaagctatcatatatactntatcctgaaaaagcaacataattcttccttccctccttt

SEQ ID NO: 217 - DNA, 262 bp, Homo sapien
  misc_feature (1)...(262): n = A,T,C or G
acctacgtgggtaagtttanaaatgttataatttcaggaanaggaacgcatataattgtatcttgcctataattttctattttaataaggaaatagcaaattggggtggggggaatgtagggcattctacagtttgagcaaaatgcaattaaatgtggaaggacagcactgaaaaattttatgaataatctgtatgattatatgtctctagagtagatttataattagccacttaccctaatatccttcatgcttgtaaagt

SEQ ID NO: 218 - DNA, 205 bp, Homo sapien
  misc_feature (1)...(205): n = A,T,C or G
accaaggtggtgcattaccggaantggatcaangacaccatcgtggccaacccctgagcacccctatcaactcccttttgtagtaaacttggaaccttggaaatgaccaggccaagactcaggcctccccagttctactgacctttgtccttangtntnangtccagggttgctaggaaaanaaatcagcagacacaggtgtaaa

SEQ ID NO: 219 - DNA, 114 bp, Homo sapien
tactgttttgtctcagtaacaataaatacaaaaagactggttgtgttccggccccatccaaccacgaagttgatttctcttgtgtgcagagtgactgattttaaaggacatgga

SEQ ID NO: 220 - DNA, 93 bp, Homo sapien
actagccagcacaaaaggcagggtagcctgaattgctttctgctctttacatttcttttaaaataagcatttagtgctcagtccctactgagt

SEQ ID NO: 221 - DNA, 167 bp, Homo sapien
  misc_feature (1)...(167): n = A,T,C or G
actangtgcaggtgcgcacaaatatttgtcgatattcccttcatcttggattccatgaggtcttttgcccagcctgtggctctactgtagtaagtttctgctgatgaggagccagnatgccccccactaccttccctgacgctccccanaaatcacccaacctctgt

SEQ ID NO: 222 - DNA, 351 bp, Homo sapien
agggcgtggtgcggagggcggtactgacctcattagtaggaggatgcattctggcaccccgttcttcacctgtcccccaatccttaaaaggccatactgcataaagtcaacaacagataaatgtttgctgaattaaaggatggatgaaaaaaattaataatgaatttttgcataatccaattttctcttttatatttctagaagaagtttctttgagcctattagatcccgggaatcttttaggtgagcatgattagagagcttgtaggttgcttttacatatatctggcatatttgagtctcgtatcaaaacaatagattggtaaaggtggtattattgtattgataagt

SEQ ID NO: 223 - DNA, 383 bp, Homo sapien
  misc_feature (1)...(383): n = A,T,C or G
aaaacaaacaaacaaaaaaaacaattcttcattcagaaaaattatcttagggactgatattggtaattatggtcaatttaatwrtrttktggggcatttccttacattgtcttgacaagattaaaatgtctgtgccaaaattttgtattttatttggagacttcttatcaaaagtaatgctgccaaaggaagtctaaggaattagtagtgttcccmtcacttgtttggagtgtgctattctaaaagattttgatttcctggaatgacaattatattttaactttggtgggggaaanagttataggaccacagtcttcacttctgatacttgtaaattaatcttttattgcacttgttttgaccattaagctatatgtttaaaa

SEQ ID NO: 224 - DNA, 320 bp, Homo sapien
cccctgaaggcttcttgttagaaaatagtacagttacaaccaataggaacaacaaaaagaaaaagtttgtgacattgtagtagggagtgtgtaccccttactccccatcaaaaaaaaaatggatacatggttaaaggataraagggcaatattttatcatatgttctaaaagagaaggaagagaaaatactactttctcraaatggaagcccttaaaggtgctttgatactgaaggacacaaatgtggccgtccatcctcctttaragttgcatgacttggacacggtaactgttgcagttttaractcmgcattgtgac

SEQ ID NO: 225 - DNA, 1214 bp, Homo sapien
gaggactgcagcccgcactcgcagccctggcaggcggcactggtcatggaaaacgaattgttctgctcgggcgtcctggtgcatccgcagtgggtgctgtcagccgcacactgtttccagaactcctacaccatcgggctgggcctgcacagtcttgaggccgaccaagagccagggagccagatggtggaggccagcctctccgtacggcacccagagtacaacagacccttgctcgctaacgacctcatgctcatcaagttggacgaatccgtgtccgagtctgacaccatccggagcatcagcattgcttcgcagtgccctaccgcggggaactcttgcctcgtttctggctggggtctgctggcgaacggcagaatgcctaccgtgctgcagtgcgtgaacgtgtcggtggtgtctgaggaggtctgcagtaagctctatgacccgctgtaccaccccagcatgttctgcgccggcggagggcaagaccagaaggactcctgcaacggtgactctggggggcccctgatctgcaacgggtacttgcagggccttgtgtctttcggaaaagccccgtgtggccaagttggcgtgccaggtgtctacaccaacctctgcaaattcactgagtggatagagaaaaccgtccaggccagttaactctggggactgggaacccatgaaattgacccccaaatacatcctgcggaaggaattcaggaatatctgttcccagcccctcctccctcaggcccaggagtccaggcccccagcccctcctccctcaaaccaagggtacagatccccagcccctcctccctcagacccaggagtccagaccccccagcccctcctccctcagacccaggagtccagcccctcctccctcagacccaggagtccagaccccccagcccctcctccctcagacccaggggtccaggcccccaacccctcctccctcagactcagaggtccaagcccccaacccctccttccccagacccagaggtccaggtcccagcccctcctccctcagacccagcggtccaatgccacctagactctccctgtacacagtgcccccttgtggcacgttgacccaaccttaccagttggtttttcattttttgtccctttcccctagatccagaaataaagtctaagagaagcgcaaaaaaaaaaaaaaaaaaaaaaaaaaaaaaaaaaaa

SEQ ID NO: 226 - DNA, 119 bp, Homo sapien
acccagtatgtgcagggagacggaaccccatgtgacagcccactccaccagggttcccaaagaacctggcccagtcataatcattcatcctgacagtggcaataatcacgataaccagt

SEQ ID NO: 227 - DNA, 818 bp, Homo sapien
acaattcatagggacgaccaatgaggacagggaatgaacccggctctcccccagccctgatttttgctacatatggggtcccttttcattctttgcaaaaacactgggttttctgagaacacggacggttcttagcacaatttgtgaaatctgtgtaraaccgggctttgcaggggagataattttcctcctctggaggaaaggtggtgattgacaggcagggagacagtgacaaggctagagaaagccacgctcggccttctctgaaccaggatggaacggcagacccctgaaaacgaagcttgtccccttccaatcagccacttctgagaacccccatctaacttcctactggaaaagagggcctcctcaggagcagtccaagagttttcaaagataacgtgacaactaccatctagaggaaagggtgcaccctcagcagagaagccgagagcttaactctggtcgtttccagagacaacctgctggctgtcttgggatgcgcccagcctttgagaggccactaccccatgaacttctgccatccactggacatgaagctgaggacactgggcttcaacactgagttgtcatgagagggacaggctctgccctcaagccggctgagggcagcaaccactctcctcccctttctcacgcaaagccattcccacaaatccagaccataccatgaagcaacgagacccaaacagtttggctcaagaggatatgaggactgtctcagcctggctttgggctgacaccatgcacacacacaaggtccacttctaggttttcagcctagatgggagtcgtgt

SEQ ID NO: 228 - DNA, 744 bp, Homo sapien
actggagacactgttgaacttgatcaagacccagaccaccccaggtctccttcgtgggatgtcatgacgtttgacatacctttggaacgagcctcctccttggaagatggaagaccgtgttcgtggccgacctggcctctcctggcctgtttcttaagatgcggagtcacatttcaatggtaggaaaagtggcttcgtaaaatagaagagcagtcactgtggaactaccaaatggcgagatgctcggtgcacattggggtgctttgggataaaagatttatgagccaactattctctggcaccagattctaggccagtttgttccactgaagcttttcccacagcagtccacctctgcaggctggcagctgaatggcttgccggtggctctgtggcaagatcacactgagatcgatgggtgagaaggctaggatgcttgtctagtgttcttagctgtcacgttggctccttccaggttggccagacggtgttggccactcccttctaaaacacaggcgccctcctggtgacagtgacccgccgtggtatgccttggcccattccagcagtcccagttatgcatttcaagtttggggtttgttcttttcgttaatgttcctctgtgttgtcagctgtcttcatttcctgggctaagcagcattgggagatgtggaccagagatccactccttaagaaccagtggcgaaagacactttctttcttcactctgaagtagctggtggt

SEQ ID NO: 229 - DNA, 300 bp, Homo sapien
cgagtctgggttttgtctataaagtttgatccctccttttctcatccaaatcatgtgaaccattacacatcgaaataaaagaaaggtggcagacttgcccaacgccaggctgacatgtgctgcagggttgttgttttttaattattattgttagaaacgtcacccacagtccctgttaatttgtatgtgacagccaactctgagaaggtcctatttttccacctgcagaggatccagtctcactaggctcctccttgccctcacactggagtctccgccagtgtgggtgcccactgacat

SEQ ID NO: 230 - DNA, 301 bp, Homo sapien
cagcagaacaaatacaaatatgaagagtgcaaagatctcataaaatctatgctgaggaatgagcgacagttcaaggaggagaagcttgcagagcagctcaagcaagctgaggagctcaggcaatataaagtcctggttcacactcaggaacgagagctgacccagttaagggagaagttgcgggaagggagagatgcctccctctcattgaatgagcatctccaggccctcctcactccggatgaaccggacaagtcccaggggcaggacctccaagaaacagacctcggccgcgaccacg

SEQ ID NO: 231 - DNA, 301 bp, Homo sapien
gcaagcacgctggcaaatctctgtcaggtcagctccagagaagccattagtcattttagccaggaactccaagtccacatccttggcaactggggacttgcgcaggttagccttgaggatggcaacacgggacttctcatcaggaagtgggatgtagatgagctgatcaagacggccaggtctgaggatggcaggatcaatgatgtcaggccggttggtaccgccaatgatgaacacatttttttttgtggacatgccatccatttctgtcaggatctggttgatgactcggtcagcagcc

SEQ ID NO: 232 - DNA, 301 bp, Homo sapien
agtaggtatttcgtgagaagttcaacaccaaaactggaacatagttctccttcaagtgttggcgacagcggggcttcctgattctggaatataactttgtgtaaattaacagccacctatagaagagtccatctgctgtgaaggagagacagagaactctgggttccgtcgtcctgtccacgtgctgtaccaagtgctggtgccagcctgttacctgttctcactgaaaatctggctaatgctcttgtgtatcacttctgattctgacaatcaatcaatcaatggcctagagcactgactg

SEQ ID NO: 233 - DNA, 301 bp, Homo sapien
atgactgacttcccagtaaggctctctaaggggtaagtaggaggatccacaggatttgagatgctaaggccccagagatcgtttgatccaaccctcttattttcagaggggaaaatggggcctagaagttacagagcatctagctggtgcgctggcacccctggcctcacacagactcccgagtagctgggactacaggcacacagtcactgaagcaggccctgttagcaattctatgcgtacaaattaacatgagatgagtagagactttattgagaaagcaagagaaaatcctatcaac

SEQ ID NO: 234 - DNA, 301 bp, Homo sapien
aggtcctacacatcgagactcatccatgattgatatgaatttaaaaattacaagcaaagacattttattcatcatgatgctttcttttgtttcttcttttcgttttcttctttttctttttcaatttcagcaacatacttctcaatttcttcaggatttaaaatcttgagggattgatctcgcctcatgacagcaagttcaatgtttttgccacctgactgaaccacttccaggagtgccttgatcaccagcttaatggtcagatcatctgcttcaatggcttcgtcagtatagttcttct

SEQ ID NO: 235 - DNA, 283 bp, Homo sapien
tggggctgtgcatcaggcgggtttgagaaatattcaattctcagcagaagccagaatttgaattccctcatcttttagggaatcatttaccaggtttggagaggattcagacagctcaggtgctttcactaatgtctctgaacttctgtccctctttgttcatggatagtccaataaataatgttatctttgaactgatgctcataggagagaatataagaactctgagtgatatcaacattagggattcaaagaaatattagatttaagctcacactggtca

SEQ ID NO: 236 - DNA, 301 bp, Homo sapien
aggtcctccaccaactgcctgaagcacggttaaaattgggaagaagtatagtgcagcataaatacttttaaatcgatcagatttccctaacccacatgcaatcttcttcaccagaagaggtcggagcagcatcattaataccaagcagaatgcgtaatagataaatacaatggtatatagtgggtagacggcttcatgagtacagtgtactgtggtatcgtaatctggacttgggttgtaaagcatcgtgtaccagtcagaaagcatcaatactcgacatgaacgaatataaagaacacca

SEQ ID NO: 237 - DNA, 301 bp, Homo sapien
cagtggtagtggtggtggacgtggcgttggtcgtggtgccttttttggtgcccgtcacaaactcaatttttgttcgctcctttttggccttttccaatttgtccatctcaattttctgggccttggctaatgcctcatagtaggagtcctcagaccagccatggggatcaaacatatcctttgggtagttggtgccaagctcgtcaatggcacagaatggatcagcttctcgtaaatctagggttccgaaattctttcttcctttggataatgtagttcatatccattccctcctttatct

SEQ ID NO: 238 - DNA, 301 bp, Homo sapien
gggcaggtttttttttttttttttttgatggtgcagacccttgctttatttgtctgacttgttcacagttcagccccctgctcagaaaaccaacgggccagctaaggagaggaggaggcaccttgagacttccggagtcgaggctctccagggttccccagcccatcaatcattttctgcaccccctgcctgggaagcagctccctggggggtgggaatgggtgactagaagggatttcagtgtgggacccagggtctgttcttcacagtaggaggtggaagggatgactaatttctttat

SEQ ID NO: 239 - DNA, 239 bp, Homo sapien
ataagcagctagggaattctttatttagtaatgtcctaacataaaagttcacataactgcttctgtcaaaccatgatactgagctttgtgacaacccagaaataactaagagaaggcaaacataataccttagagatcaagaaacatttacacagttcaactgtttaaaaatagctcaacattcagccagtgagtagagtgtgaatgccagcatacacagtatacaggtccttcaggga

SEQ ID NO: 240 - DNA, 300 bp, Homo sapien
ggtcctaatgaagcagcagcttccacattttaacgcaggtttacggtgatactgtcctttgggatctgccctccagtggaaccttttaaggaagaagtgggcccaagctaagttccacatgctgggtgagccagatgacttctgttccctggtcactttcttcaatggggcgaatgggggctgccaggtttttaaaatcatgcttcatcttgaagcacacggtcacttcaccctcctcacgctgtgggtgtactttgatgaaaatacccactttgttggcctttctgaagctataatgtc

SEQ ID NO: 241 - DNA, 301 bp, Homo sapien
gaggtctggtgctgaggtctctgggctaggaagaggagttctgtggagctggaagccagacctctttggaggaaactccagcagctatgttggtgtctctgagggaatgcaacaaggctgctcctccatgtattggaaaactgcaaactggactcaactggaaggaagtgctgctgccagtgtgaagaaccagcctgaggtgacagaaacggaagcaaacaggaacagccagtcttttcttcctcctcctgtcatacggtctctctcaagcatcctttgttgtcaggggcctaaaagggag

SEQ ID NO: 242 - DNA, 301 bp, Homo sapien
ccgaggtcctgggatgcaaccaatcactctgtttcacgtgacttttatcaccatacaatttgtggcatttcctcattttctacattgtagaatcaagagtgtaaataaatgtatatcgatgtcttcaagaatatatcattcctttttcactagaacccattcaaaatataagtcaagaatcttaatatcaacaaatatatcaagcaaactggaaggcagaataactaccataatttagtataagtacccaaagttttataaatcaaaagccctaatgataaccatttttagaattcaatca

SEQ ID NO: 243 - DNA, 301 bp, Homo sapien
aggtaagtcccagtttgaagctcaaaagatctggtatgagcataggctcatcgacgacatggtggcccaagctatgaaatcagagggaggcttcatctgggcctgtaaaaactatgatggtgacgtgcagtcggactctgtggcccaagggtatggctctctcggcatgatgaccagcgtgctggtttgtccagatggcaagacagtagaagcagaggctgcccacgggactgtaacccgtcactaccgcatgttccagaaaggacaggagacgtccaccaatcccattgcttccattttt

SEQ ID NO: 244 - DNA, 300 bp, Homo sapien
gctggtttgcaagaatgaaatgaatgattctacagctaggacttaaccttgaaatggaaagtcatgcaatcccatttgcaggatctgtctgtgcacatgcctctgtagagagcagcattcccagggaccttggaaacagttgacactgtaaggtgcttgctccccaagacacatcctaaaaggtgttgtaatggtgaaaacgtcttccttctttattgccccttcttatttatgtgaacaactgtttgtcttttgtgtatcttttttaaactgtaaagttcaattgtgaaaatgaatatc

SEQ ID NO: 245 - DNA, 301 bp, Homo sapien
gtctgagtatttaaaatgttattgaaattatccccaaccaatgttagaaaagaaagaggttatatacttagataaaaaatgaggtgaattactatccattgaaatcatgctcttagaattaaggccaggagatattgtcattaatgtaracttcaggacactagagtatagcagccctatgttttcaaagagcagagatgcaattaaatattgtttagcatcaaaaaggccactcaatacagctaataaaatgaaagacctaatttctaaagcaattctttataatttacaaagttttaag

SEQ ID NO: 246 - DNA, 301 bp, Homo sapien
ggtctgtcctacaatgcctgcttcttgaaagaagtcggcactttctagaatagctaaataacctgggcttattttaaagaactatttgtagctcagattggttttcctatggctaaaataagtgcttcttgtgaaaattaaataaaacagttaattcaaagccttgatatatgttaccactaacaatcatactaaatatattttgaagtacaaagtttgacatgctctaaagtgacaacccaaatgtgtcttacaaaacacgttcctaacaaggtatgctttacactaccaatgcagaaac

SEQ ID NO: 247 - DNA, 301 bp, Homo sapien
aggtcctttggcagggctcatggatcagagctcaaactggagggaaaggcatttcgggtagcctaagagggcgactggcggcagcacaaccaaggaaggcaaggttgtttcccccacgctgtgtcctgtgttcaggtgcgacacacaatcctcatgggaacaggatcacccatgcgctgcccttgatgatcaaggttggggcttaagtggattaagggaggcaagttctgggttccttgccttttcaaaccatgaagtcaggctctgtatccctccttttcctaactgatattctaactaa

SEQ ID NO: 248 - DNA, 301 bp, Homo sapien
aggtccttggagatgccatttcagccgaaggactcttctwttcggaagtacaccctcactattaggaagattcttaggggtaatttttctgaggaaggagaactagccaacttaagaattacaggaagaaagtggtttggaagacagccaaagaaataaaagcagattaaattgtatcaggtacattccagcctgttggcaactccataaaaacatttcagattttaatcccgaatttagctaatgagactggatttttgttttttatgttgtgtgtcgcagagctaaaaactcagttccc

SEQ ID NO: 249 - DNA, 301 bp, Homo sapien
gtccagaggaagcacctggtgctgaactaggcttgccctgctgtgaacttgcacttggagccctgacgctgctgttctccccgaaaaacccgaccgacctccgcgatctccgtcccgcccccagggagacacagcagtgactcagagctggtcgcacactgtgcctccctcctcaccgcccatcgtaatgaattattttgaaaattaattccaccatcctttcagattctggatggaaagactgaatctttgactcagaattgtttgctgaaaagaatgatgtgactttcttagtcattta

SEQ ID NO: 250 - DNA, 301 bp, Homo sapien
ggtctgtgacaaggacttgcaggctgtgggaggcaagtgacccttaacactacacttctccttatctttattggcttgataaacataattatttctaacactagcttatttccagttgcccataagcacatcagtacttttctctggctggaatagtaaactaaagtatggtacatctacctaaaagactactatgtggaataatacatactaatgaagtattacatgatttaaagactacaataaaaccaaacatgcttataacattaagaaaaacaataaagatacatgattgaaacca

SEQ ID NO: 251 - DNA, 301 bp, Homo sapien
gccgaggtcctacatttggcccagtttccccctgcatcctctccagggcccctgcctcatagacaacctcatagagcataggagaactggttgccctgggggcagggggactgtctggatggcaggggtcctcaaaaatgccactgtcactgccaggaaatgcttctgagcagtacacctcattgggatcaatgaaaagcttcaagaaatcttcaggctcactctcttgaaggcccggaacctctggaggggggcagtggaatcccagctccaggacggatcctgtcgaaaagatatcctc

SEQ ID NO: 252 - DNA, 301 bp, Homo sapien
gcaaccaatcactctgtttcacgtgacttttatcaccatacaatttgtggcatttcctcattttctacattgtagaatcaagagtgtaaataaatgtatatcgatgtcttcaagaatatatcattcctttttcactaggaacccattcaaaatataagtcaagaatcttaatatcaacaaatatatcaagcaaactggaaggcagaataactaccataatttagtataagtacccaaagttttataaatcaaaagccctaatgataaccatttttagaattcaatcatcactgtagaatca

SEQ ID NO: 253 - DNA, 301 bp, Homo sapien
ttccctaagaagatgttattttgttgggttttgttccccctccatctcgattctcgtacccaactaaaaaaaaaaaataaagaaaaaatgtgctgcgttctgaaaaataactccttagcttggtctgattgttttcagaccttaaaatataaacttgtttcacaagctttaatccatgtggattttttttcttagagaaccacaaaacataaaaggagcaagtcggactgaatacctgtttccatagtgcccacagggtattcctcacattttctccataggaaaatgctttttcccaagg

SEQ ID NO: 254 - DNA, 301 bp, Homo sapien
cgctgcgcctttcccttgggggaggggcaaggccagagggggtccaagtgcagcacgaggaacttgaccaattcccttgaagcgggtgggttaaaccctgtaaatgggaacaaaatccccccaaatctcttcatcttaccctggtggactcctgactgtagaattttttggttgaaacaagaaaaaaataaagctttggacttttcaaggttgcttaacaggtactgaaagactggcctcacttaaactgagccaggaaaagctgcagatttattaatgggtgtgttagtgtgcagtgcct

SEQ ID NO: 255 - DNA, 302 bp, Homo sapien
agctttttttttttttttttttttttttttttcattaaaaaatagtgctctttattataaattactgaaatgtttcttttctgaatataaatataaatatgtgcaaagtttgacttggattgggattttgttgagttcttcaagcatctcctaataccctcaagggcctgagtaggggggaggaaaaaggactggaggtggaatctttataaaaaacaagagtgattgaggcagattgtaaacattattaaaaaacaagaaacaaacaaaaaaatagagaaaaaaaccaccccaacacacaa

SEQ ID NO: 256 - DNA, 301 bp, Homo sapien
  misc_feature (1)...(301): n = A,T,C or G
gttccagaaaacattgaaggtggcttcccaaagtctaactagggataccccctctagcctaggaccctcctccccacacctcaatccaccaaaccatccataatgcacccagataggcccacccccaaaagcctggacaccttgagcacacagttatgaccaggacagactcatctctataggcaaatagctgctggcaaactggcattacctggtttgtggggatgggggggcaagtgtgtggcctctcggcctggttagcaagaacattcagggtaggcctaagttantcgtgttagtt

SEQ ID NO: 257 - DNA, 301 bp, Homo sapien
gttgtggaggaactctggcttgctcattaagtcctactgattttcactatcccctgaatttccccacttatttttgtctttcactatcgcaggccttagaagaggtctacctgcctccagtcttacctagtccagtctaccccctggagttagaatggccatcctgaagtgaaaagtaatgtcacattactcccttcagtgatttcttgtagaagtgccaatccctgaatgccaccaagatcttaatcttcacatctttaatcttatctctttgactcctctttacaccggagaaggctcc

SEQ ID NO: 258 - DNA, 301 bp, Homo sapien
  misc_feature (1)...(301): n = A,T,C or G
cagcagtagtagatgccgtatgccagcacgcccagcactcccaggatcagcaccagcaccaggggcccagccaccaggcgcagaagcaagataaacagtaggctcaagaccagagccacccccagggcaacaagaatccaataccaggactgggcaaaatcttcaaagatcttaacactgatgtctcgggcattgaggctgtcaataanacgctgatcccctgctgtatggtggtgtcattggtgatccctgggagcgccggtggagtaacgttggtccatggaaagcagcgcccacaact

SEQ ID NO: 259 - DNA, 301 bp, Homo sapien
  misc_feature (1)...(301): n = A,T,C or G
tcatatatgcaaacaaatgcagactangcctcaggcagagactaaaggacatctcttggggtgtcctgaagtgatttggacccctgagggcagacacctaagtaggaatcccagtgggaagcaaagccataaggaagcccaggattccttgtgatcaggaagtgggccaggaaggtctgttccagctcacatctcatctgcatgcagcacggaccggatgcgcccactgggtcttggcttccctcccatcttctcaagcagtgtccttgttgagccatttgcatccttggctccaggtggc

SEQ ID NO: 260 - DNA, 301 bp, Homo sapien
ttttttttctccctaaggaaaaagaaggaacaagtctcataaaaccaaataagcaatggtaaggtgtcttaacttgaaaaagattaggagtcactggtttacaagttataattgaatgaaagaactgtaacagccacagttggccatttcatgccaatggcagcaaacaacaggattaactagggcaaaataaataagtgtgtggaagccctgataagtgcttaataaacagactgattcactgagacatcagtacctgcccgggcggccgctcgagccgaattctgcagatatccatcac

SEQ ID NO: 261 - DNA, 301 bp, Homo sapien
aaatattcgagcaaatcctgtaactaatgtgtctccataaaaggctttgaactcagtgaatctgcttccatccacgattctagcaatgacctctcggacatcaaagctcctcttaaggttagcaccaactattccatacaattcatcagcaggaaataaaggctcttcagaaggttcaatggtgacatccaatttcttctgataatttagattcctcacaaccttcctagttaagtgaagggcatgatgatcatccaaagcccagtggtcacttactccagactttctgcaatgaagatca

SEQ ID NO: 262 - DNA, 301 bp, Homo sapien
gaggagagcctgttacagcatttgtaagcacagaatactccaggagtatttgtaattgtctgtgagcttcttgccgcaagtctctcagaaatttaaaaagatgcaaatccctgagtcacccctagacttcctaaaccagatcctctggggctggaacctggcactctgcatttgtaatgagggctttctggtgcacacctaattttgtgcatctttgccctaaatcctggattagtgccccatcattacccccacattataatgggatagattcagagcagatactctccagcaaagaatc

SEQ ID NO: 263 - DNA, 301 bp, Homo sapien
  misc_feature (1)...(301): n = A,T,C or G
tttagcttgtggtaaatgactcacaaaactgattttaaaatcaagttaatgtgaattttgaaaattactacttaatcctaattcacaataacaatggcattaaggtttgacttgagttggttcttagtattatttatggtaaataggctcttaccacttgcaaataactggccacatcattaatgactgacttcccagtaaggctctctaaggggtaagtangaggatccacaggatttgagatgctaaggccccagagatcgtttgatccaaccctcttattttcagaggggaaaatggg

SEQ ID NO: 264 - DNA, 301 bp, Homo sapien
aaagacgttaaaccactctactaccacttgtggaactctcaaagggtaaatgacaaasccaatgaatgactctaaaaacaatatttacatttaatggtttgtagacaataaaaaaacaaggtggatagatctagaattgtaacattttaagaaaaccatascatttgacagatgagaaagctcaattatagatgcaaagttataactaaactactatagtagtaaagaaatacatttcacacccttcatataaattcactatcttggcttgaggcactccataaaatgtatcacgtgcata

SEQ ID NO: 265 - DNA, 301 bp, Homo sapien
tgcccaagttatgtgtaagtgtatccgcacccagaggtaaaactacactgtcatctttgtcttcttgtgacgcagtatttcttctctggggagaagccgggaagtcttctcctggctctacatattcttggaagtctctaatcaacttttgttccatttgtttcatttcttcaggagggattttcagtttgtcaacatgttctctaacaacacttgcccatttctgtaaagaatccaaagcagtccaaggctttgacatgtcaacaaccagcataactagagtatccttcagagatacggc

SEQ ID NO: 266 - DNA, 301 bp, Homo sapien
taccgtctgcccttcctcccatccaggccatctgcgaatctacatgggtcctcctattcgacaccagatcactctttcctctacccacaggcttgctatgagcaagagacacaacctcctctcttctgtgttccagcttcttttcctgttcttcccaccccttaagttctattcctggggatagagacaccaatacccataacctctctcctaagcctccttataacccagggtgcacagcacagactcctgacaactggtaaggccaatgaactgggagctcacagctggctgtgcctga

SEQ ID NO: 267 - DNA, 301 bp, Homo sapien
aaagagcacaggccagctcagcctgccctggccatctagactcagcctggctccatgggggttctcagtgctgagtccatccaggaaaagctcacctagaccttctgaggctgaatcttcatcctcacaggcagcttctgagagcctgatattcctagccttgatggtctggagtaaagcctcattctgattcctctccttcttttctttcaagttggctttcctcacatccctctgttcaattcgcttcagcttgtctgctttagccctcatttccagaagcttcttctctttggcatct

SEQ ID NO: 268 - DNA, 301 bp, Homo sapien
aatgtctcactcaactacttcccagcctaccgtggcctaattctgggagttttcttcttagatcttgggagagctggttcttctaaggagaaggaggaaggacagatgtaactttggatctcgaagaggaagtctaatggaagtaattagtcaacggtccttgtttagactcttggaatatgctgggtggctcagtgagcccttttggagaaagcaagtattattcttaaggagtaaccacttcccattgttctactttctaccatcatcaattgtatattatgtattctttggagaacta

SEQ ID NO: 269 - DNA, 301 bp, Homo sapien
taacaatatacactagctatctttttaactgtccatcattagcaccaatgaagattcaataaaattacctttattcacacatctcaaaacaattctgcaaattcttagtgaagtttaactatagtcacagaccttaaatattcacattgttttctatgtctactgaaaataagttcactacttttctggatattctttacaaaatcttattaaaattcctggtattatcacccccaattatacagtagcacaaccaccttatgtagtttttacatgatagctctgtagaagtttcacatct

SEQ ID NO: 270 - DNA, 301 bp, Homo sapien
cattgaagagcttttgcgaaacatcagaacacaagtgcttataaaattaattaagccttacacaagaatacatattccttttatttctaaggagttaaacatagatgtagctgatgtggagagcttgctggtgcagtgcatattggataacactattcatggccgaattgatcaagtcaaccaactccttgaactggatcatcagaagaagggtggtgcacgatatactgcactagataatggaccaaccaactaaattctctcaccaggctgtatcagtaaactggcttaacagaaaaca

SEQ ID NO: 271 - DNA, 301 bp, Homo sapien
  misc_feature (1)...(301): n = A,T,C or G
aaaaggttctcataagattaacaatttaaataaatatttgatagaacattctttctcatttttatagctcatctttagggttgatattcagttcatgcttcccttgctgttcttgatccagaattgcaatcacttcatcagcctgtattcgctccaattctctataaagtgggtccaaggtgaaccacagagccacagcacacctctttcccttggtgactgccttcaccccatganggttctctcctccagatganaactgatcatgcgcccacattttgggttttatagaagcagtcac

SEQ ID NO: 272 - DNA, 301 bp, Homo sapien
taaattgctaagccacagataacaccaatcaaatggaacaaatcactgtcttcaaatgtcttatcagaaaaccaaatgagcctggaatcttcataatacctaaacatgccgtatttaggatccaataattccctcatgatgagcaagaaaaattctttgcgcacccctcctgcatccacagcatcttctccaacaaatataaccttgagtggcttcttgtaatctatgttctttgttttcctaaggacttccattgcatctcctacaatattttctctacgcaccactagaattaagcagg

SEQ ID NO: 273 - DNA, 301 bp, Homo sapien
  misc_feature (1)...(301): n = A,T,C or G
acatgtgtgtatgtgtatctttgggaaaanaanaagacatcttgtttaytatttttttggagagangctgggacatggataatcacwtaatttgctaytatyactttaatctgactygaagaaccgtctaaaaataaaatttaccatgtcdtatattccttatagtatgcttatttcaccttytttctgtccagagagagtatcagtgacananatttmagggtgaamacatgmattggtgggacttntytttacngagmaccctgcccgsgcgccctcgmakcnganttccgcsananct

SEQ ID NO: 274 - DNA, 301 bp, Homo sapien
  misc_feature (1)...(301): n = A,T,C or G
cttatatactctttctcagaggcaaaagaggagatgggtaatgtagacaattctttgaggaacagtaaatgattattagagagaangaatggaccaaggagacagaaattaacttgtaaatgattctctttggaatctgaatgagatcaagaggccagctttagcttgtggaaaagtccatctaggtatggttgcattctcgtcttcttttctgcagtagataatgaggtaaccgaaggcaattgtgcttcttttgataagaagctttcttggtcatatcaggaaattccaganaaagtcc

SEQ ID NO: 275 - DNA, 301 bp, Homo sapien
  misc_feature (1)...(301): n = A,T,C or G
tcggtgtcagcagcacgtggcattgaacattgcaatgtggagcccaaaccacagaaaatggggtgaaattggccaactttctattaacttatgttggcaattttgccaccaacagtaagctggcccttctaataaaagaaaattgaaaggtttctcactaaacggaattaagtagtggagtcaagagactcccaggcctcagcgtacctgcccgggcggccgctcgaagccgaattctgcagatatccatcacactggcggncgctcgancatgcatctagaaggnccaattcgccctata

SEQ ID NO: 276 - DNA, 301 bp, Homo sapien
tgtacacatactcaataaataaatgactgcattgtggtattattactatactgattatatttatcatgtgacttctaattagaaaatgtatccaaaagcaaaacagcagatatacaaaattaaagagacagaagatagacattaacagataaggcaacttatacattgagaatccaaatccaatacatttaaacatttgggaaatgagggggacaaatggaagccagatcaaatttgtgtaaaactattcagtatgtttcccttgcttcatgtctgagaaggctctccttcaatggggatg

SEQ ID NO: 277 - DNA, 301 bp, Homo sapien
  misc_feature (1)...(301): n = A,T,C or G
tttgttgatgtcagtattttattacttgcgttatgagtgctcacctgggaaattctaaagatacagaggacttggaggaagcagagcaactgaatttaatttaaaagaaggaaaacattggaatcatggcactcctgatactttcccaaatcaacactctcaatgccccaccctcgtcctcaccatagtggggagactaaagtggccacggatttgccttangtgtgcagtgcgttctgagttcnctgtcgattacatctgaccagtctcctttttccgaagtccntccgttcaatcttgc

SEQ ID NO: 278 - DNA, 301 bp, Homo sapien
  misc_feature (1)...(301): n = A,T,C or G
taccactacactccagcctgggcaacagagcaagacctgtctcaaagcataaaatggaataacatatcaaatgaaacagggaaaatgaagctgacaatttatggaagccagggcttgtcacagtctctactgttattatgcattacctgggaatttatataagcccttaataataatgccaatgaacatctcatgtgtgctcacaatgttctggcactattataagtgcttcacaggttttatgtgttcttcgtaactttatggantaggtactcggccgcgaacacgctaagccgaattc

SEQ ID NO: 279 - DNA, 301 bp, Homo sapien
  misc_feature (1)...(301): n = A,T,C or G
aaagcaggaatgacaaagcttgcttttctggtatgttctaggtgtattgtgacttttactgttatattaattgccaatataagtaaatatagattatatatgtatagtgtttcacaaagcttagacctttaccttccagccaccccacagtgcttgatatttcagagtcagtcattggttatacatgtgtagttccaaagcacataagctagaanaanaaatatttctagggagcactaccatctgttttcacatgaaatgccacacacatagaactccaacatcaatttcattgcacaga

SEQ ID NO: 280 - DNA, 301 bp, Homo sapien
ggtactggagttttcctcccctgtgaaaacgtaactactgttgggagtgaattgaggatgtagaaaggtggtggaaccaaattgtggtcaatggaaataggagaatatggttctcactcttgagaaaaaaacctaagattagcccaggtagttgcctgtaacttcagtttttctgcctgggtttgatatagtttagggttggggttagattaagatctaaattacatcaggacaaagagacagactattaactccacagttaattaaggaggtatgttccatgtttatttgttaaagcagt

SEQ ID NO: 281 - DNA, 301 bp, Homo sapien
aggtacaagaaggggaatgggaaagagctgctgctgtggcattgttcaacttggatattcgccgagcaatccaaatcctgaatgaaggggcatcttctgaaaaaggagatctgaatctcaatgtggtagcaatggctttatcgggttatacggatgagaagaactccctttggagagaaatgtgtagcacactgcgattacagctaaataacccgtatttgtgtgtcatgtttgcatttctgacaagtgaaacaggatcttacgatggagttttgtatgaaaacaaagttgcagtacctcg

SEQ ID NO: 282 - DNA, 301 bp, Homo sapien
caggtactacagaattaaaatactgacaagcaagtagtttcttggcgtgcacgaattgcatccagaacccaaaaattaagaaattcaaaaagacattttgtgggcacctgctagcacagaagcgcagaagcaaagcccaggcagaaccatgctaaccttacagctcagcctgcacagaagcgcagaagcaaagcccaggcagaaccatgctaaccttacagctcagcctgcacagaagcgcagaagcaaagcccaggcagaacatgctaaccttacagctcagcctgcacagaagcacaga

SEQ ID NO: 283 - DNA, 301 bp, Homo sapien
atctgtatacggcagacaaactttataragtgtagagaggtgagcgaaaggatgcaaaagcactttgagggctttataataatatgctgcttgaaaaaaaaaatgtgtagttgatactcagtgcatctccagacatagtaaggggttgctctgaccaatcaggtgatcattttttctatcacttcccaggttttatgcaaaaattttgttaaattctataatggtgatatgcatcttttaggaaacatatacatttttaaaaatctattttatgtaagaactgacagacgaatttgctttg

SEQ ID NO: 284 - DNA, 301 bp, Homo sapien
caggtacaaaacgctattaagtggcttagaatttgaacatttgtggtctttatttactttgcttcgtgtgtgggcaaagcaacatcttccctaaatatatattaccaagaaaagcaagaagcagattaggtttttgacaaaacaaacaggccaaaagggggctgacctggagcagagcatggtgagaggcaaggcatgagagggcaagtttgttgtggacagatctgtgcctactttattactggagtaaaagaaaacaaagttcattgatgtcgaaggatatatacagtgttagaaatta

SEQ ID NO: 285 - DNA, 301 bp, Homo sapien
  misc_feature (1)...(301): n = A,T,C or G
acatcaccatgatcggatcccccacccattatacgttgtatgtttacataaatactcttcaatgatcattagtgttttaaaaaaaatactgaaaactccttctgcatcccaatctctaaccaggaaagcaaatgctatttacagacctgcaagccctccctcaaacnaaactatttctggattaaatatgtctgacttcttttgaggtcacacgactaggcaaatgctatttacgatctgcaaaagctgtttgaagagtcaaagcccccatgtgaacacgatttctggaccctgtaacagt

SEQ ID NO: 286 - DNA, 301 bp, Homo sapien
taccactgcattccagcctgggtgacagagtgagactccgtctccaaaaaaaactttgcttgtatattatttttgccttacagtggatcattctagtaggaaaggacagtaagattttttatcaaaatgtgtcatgccagtaagagatgttatattcttttctcatttcttccccacccaaaaataagctaccatatagcttataagtctcaaatttttgccttttactaaaatgtgattgtttctgttcattgtgtatgcttcatcacctatattaggcaaattccattttttcccttgt

SEQ ID NO: 287 - DNA, 301 bp, Homo sapien
tacagatctgggaactaaatattaaaaatgagtgtggctggatatatggagaatgttgggcccagaaggaacgtagagatcagatattacaacagctttgttttgagggttagaaatatgaaatgatttggttatgaacgcacagtttaggcagcagggccagaatcctgaccctctgccccgtggttatctcctccccagcttggctgcctcatgttatcacagtattccattttgtttgttgcatgtcttgtgaagccatcaagattttctcgtctgttttcctctcattggtaatgct

SEQ ID NO: 288 - DNA, 301 bp, Homo sapien
gtacacctaactgcaaggacagctgaggaatgtaatgggcagccgcttttaaagaagtagagtcaataggaagacaaattccagttccagctcagtctgggtatctgcaaagctgcaaaagatctttaaagacaatttcaagagaatatttccttaaagttggcaatttggagatcatacaaaagcatctgcttttgtgatttaatttagctcatctggccactggaagaatccaaacagtctgccttaattttggatgaatgcatgatggaaattcaataatttagaaagttaaaaaaaa

SEQ ID NO: 289 - DNA, 301 bp, Homo sapien
  misc_feature (1)...(301): n = A,T,C or G
ggtacactgtttccatgttatgtttctacacattgctacctcagtgctcctggaaacttagcttttgatgtctccaagtagtccaccttcatttaactctttgaaactgtatcatctttgccaagtaagagtggtggcctatttcagctgctttgacaaaatgactggctcctgacttaacgttctataaatgaatgtgctgaagcaaagtgcccatggtggcggcgaanaagagaaagatgtgttttgttttggactctctgtggtcccttccaatgctgtgggtttccaaccagnggaa

SEQ ID NO: 290 - DNA, 301 bp, Homo sapien
  misc_feature (1)...(301): n = A,T,C or G
acactgagctcttcttgataaatatacagaatgcttggcatatacaagattctatactactgactgatctgttcatttctctcacagctcttacccccaaaagcttttccaccctaagtgttctgacctccttttctaatcacagtagggatagaggcaganccacctacaatgaacatggagttctatcaagaggcagaaacagcacagaatcccagttttaccattcgctagcagtgctgccttgaacaaaaacatttctccatgtctcattttcttcatgcctcaagtaacagtgaga

SEQ ID NO: 291 - DNA, 301 bp, Homo sapien
caggtaccaatttcttctatcctagaaacatttcattttatgttgttgaaacataacaactatatcagctagattttttttctatgctttacctgctatggaaaatttgacacattctgctttactcttttgtttataggtgaatcacaaaatgtatttttatgtattctgtagttcaatagccatggctgtttacttcatttaatttatttagcataaagacattatgaaaaggcctaaacatgagcttcacttccccactaactaattagcatctgttatttcttaaccgtaatgccta

SEQ ID NO: 292 - DNA, 301 bp, Homo sapien
  misc_feature (1)...(301): n = A,T,C or G
accttttagtagtaatgtctaataataaataagaaatcaattttataaggtccatatagctgtattaaataatttttaagtttaaaagataaaataccatcattttaaatgttggtattcaaaaccaaagnatataaccgaaaggaaaaacagatgagacataaaatgatttgcnagatgggaaatatagtasttyatgaatgttnattaaattccagttataatagtggctacacactctcactacacacacagaccccacagtcctatatgccacaaacacatttccataacttgaaaa

SEQ ID NO: 293 - DNA, 301 bp, Homo sapien
ggtaccaagtgctggtgccagcctgttacctgttctcactgaaaagtctggctaatgctcttgtgtagtcacttctgattctgacaatcaatcaatcaatggcctagagcactgactgttaacacaaacgtcactagcaaagtagcaacagctttaagtctaaatacaaagctgttctgtgtgagaattttttaaaaggctacttgtataataacccttgtcatttttaatgtacctcggccgcgaccacgctaagccgaattctgcagatatccatcacactggcggccgctcgagcatg

SEQ ID NO: 294 - DNA, 301 bp, Homo sapien
  misc_feature (1)...(301): n = A,T,C or G
tgacccataacaatatacactagctatctttttaactgtccatcattagcaccaatgaagattcaataaaattacctttattcacacatctcaaaacaattctgcaaattcttagtgaagtttaactatagtcacagancttaaatattcacattgttttctatgtctactgaaaataagttcactacttttctgggatattctttacaaaatcttattaaaattcctggtattatcacccccaattatacagtagcacaaccaccttatgtagtttttacatgatagctctgtagaggtt

SEQ ID NO: 295 - DNA, 305 bp, Homo sapien
gtactctttctctcccctcctctgaatttaattctttcaacttgcaatttgcaaggattacacatttcactgtgatgtatattgtgttgcaaaaaaaaaagtgtctttgtttaaaattacttggtttgtgaatccatcttgctttttccccattggaactagtcattaacccatctctgaactggtagaaaaacrtctgaagagctagtctatcagcatctgacaggtgaattggatggttctcagaaccatttcacccagacagcctgtttctatcctgtttaataaattagtttgggttctct

SEQ ID NO: 296 - DNA, 301 bp, Homo sapien
aggtactatgggaagctgctaaaataatatttgatagtaaaagtatgtaatgtgctatctcacctagtagtaaactaaaaataaactgaaactttatggaatctgaagttattttccttgattaaatagaattaataaaccaatatgaggaaacatgaaaccatgcaatctactatcaactttgaaaaagtgattgaacgaaccacttagctttcagatgatgaacactgataagtcatttgtcattactataaattttaaaatctgttaataagatggcctatagggaggaaaaaggggc

SEQ ID NO: 297 - DNA, 300 bp, Homo sapien
  misc_feature (1)...(300): n = A,T,C or G
actgagttttaactggacgccaagcaggcaaggctggaaggttttgctctctttgtgctaaaggttttgaaaaccttgaaggagaatcattttgacaagaagtacttaagagtctagagaacaaagangtgaaccagctgaaagctctcgggggaancttacatgtgttgttaggcctgttccatcattgggagtgcactggccatccctcaaaatttgtctgggctggcctgagtggtcaccgcacctcggccgcgaccacgctaagccgaattctgcagatatccatcacactggcgg

SEQ ID NO: 298 - DNA, 301 bp, Homo sapien
  misc_feature (1)...(301): n = A,T,C or G
tatggggtttgtcacccaaaagctgatgctgagaaaggcctccctggggcccctcccgcgggcatctgagagacctggtgttccagtgtttctggaaatgggtcccagtgccgccggctgtgaagctctcagatcaatcacgggaagggcctggcggtggtggccacctggaaccaccctgtcctgtctgtttacatttcactaycaggttttctctgggcattacnatttgttcccctacaacagtgacctgtgcattctgctgtggcctgctgtgtctgcaggtggctctcagcgaggt

SEQ ID NO: 299 - DNA, 301 bp, Homo sapien
gttttgagacggagtttcactcttgttgcccagactggactgcaatggcagggtctctgctcactgcaccctctgcctcccaggttcgagcaattctcctgcctcagcctcccaggtagctgggattgcaggctcacgccaccatacccagctaatttttttgtatttttagtagagacggagtttcgccatgttggccagctggtctcaaactcctgacctcaagcgacctgcctgcctcggcctcccaaagtgctggaattataggcatgagtcaacacgcccagcctaaagatatttt

SEQ ID NO: 300 - DNA, 301 bp, Homo sapien
attcagttttatttgctgccccagtatctgtaaccaggagtgccacaaaatcttgccagatatgtcccacacccactgggaaaggctcccacctggctacttcctctatcagctgggtcagctgcattccacaaggttctcagcctaatgagtttcactacctgccagtctcaaaacttagtaaagcaagaccatgacattcccccacggaaatcagagtttgccccaccgtcttgttactataaagcctgcctctaacagtccttgcttcttcacaccaatcccgagcgcatcccccatg

SEQ ID NO: 301 - DNA, 301 bp, Homo sapien
ttaaatttttgagaggataaaaaggacaaataatctagaaatgtgtcttcttcagtctgcagaggaccccaggtctccaagcaaccacatggtcaagggcatgaataattaaaagttggtgggaactcacaaagaccctcagagctgagacacccacaacagtgggagctcacaaagaccctcagagctgagacacccacaacagtgggagctcacaaagaccctcagagctgagacacccacaacagcacctcgttcagctgccacatgtgtgaataaggatgcaatgtccagaagtgtt

SEQ ID NO: 302 - DNA, 301 bp, Homo sapien
aggtacacatttagcttgtggtaaatgactcacaaaactgattttaaaatcaagttaatgtgaattttgaaaattactacttaatcctaattcacaataacaatggcattaaggtttgacttgagttggttcttagtattatttatggtaaataggctcttaccacttgcaaataactggccacatcattaatgactgacttcccagtaaggctctctaaggggtaagtaggaggatccacaggatttgagatgctaaggccccagagatcgtttgatccaaccctcttattttcagaggg

SEQ ID NO: 303 - DNA, 301 bp, Homo sapien
aggtaccaactgtggaaataggtagaggatcattttttctttccatatcaactaagttgtatattgttttttgacagtttaacacatcttcttctgtcagagattctttcacaatagcactggctaatggaactaccgcttgcatgttaaaaatggtggtttgtgaaatgatcataggccagtaacgggtatgtttttctaactgatcttttgctcgttccaaagggacctcaagacttccatcgattttatatctggggtctagaaaaggagttaatctgttttccctcataaattcacc

SEQ ID NO: 304 - DNA, 301 bp, Homo sapien
acatggatgttattttgcagactgtcaacctgaatttgtatttgcttgacattgcctaattattagtttcagtttcagcttacccactttttgtctgcaacatgcaraasagacagtgccctttttagtgtatcatatcaggaatcatctcacattggtttgtgccattactggtgcagtgactttcagccacttgggtaaggtggagttggccatatgtctccactgcaaaattactgattttccttttgtaattaataagtgtgtgtgtgaagattctttgagatgaggtatatatctc

SEQ ID NO: 305 - DNA, 301 bp, Homo sapien
  misc_feature (1)...(301): n = A,T,C or G
gangtacagcgtggtcaaggtaacaagaagaaaaaaatgtgagtggcatcctgggatgagcagggggacagacctggacagacacgttgtcatttgctgctgtgggtaggaaaatgggcgtaaaggaggagaaacagatacaaaatctccaactcagtattaaggtattctcatgcctagaatattggtagaaacaagaatacattcatatggcaaataactaaccatggtggaacaaaattctgggatttaagttggataccaangaaattgtattaaaagagctgttcatggaataaga

SEQ ID NO: 306 - protein, 8 aa, Homo sapien
VLGWVAEL

SEQ ID NO: 307 - DNA, 637 bp, Homo sapien
acagggratgaagggaaagggagaggatgaggaagcccccctggggatttggtttggtccttgtgatcaggtggtctatggggcttatccctacaaagaagaatccagaaataggggcacattgaggaatgatacttgagcccaaagagcattcaatcattgttttatttgccttmttttcacaccattggtgagggagggattaccaccctggggttatgaagatggttgaacaccccacacatagcaccggagatatgagatcaacagtttcttagccatagagattcacagcccagagcaggaggacgcttgcacaccatgcaggatgacatgggggatgcgctcgggattggtgtgaagaagcaaggactgttagaggcaggctttatagtaacaagacggtggggcaaactctgatttccgtgggggaatgtcatggtcttgctttactaagttttgagactggcaggtagtgaaactcattaggctgagaaccttgtggaatgcacttgacccasctgatagaggaagtagccaggtgggagcctttcccagtgggtgtgggacatatctggcaagattttgtggcactcctggttacagatactggggcagcaaataaaactgaatcttg

SEQ ID NO: 308 - DNA, 647 bp, Homo sapien
  misc_feature (1)...(647): n = A,T,C or G
acgattttcattatcatgtaaatcgggtcactcaaggggccaaccacagctgggagccactgctcaggggaaggttcatatgggactttctactgcccaaggttctatacaggatataaaggngcctcacagtatagatctggtagcaaagaagaagaaacaaacactgatctctttctgccacccctctgaccctttggaactcctctgaccctttagaacaagcctacctaatatctgctagagaaaagaccaacaacggcctcaaaggatctcttaccatgaaggtctcagctaattcttggctaagatgtgggttccacattaggttctgaatatggggggaagggtcaatttgctcattttgtgtgtggataaagtcaggatgcccaggggccagagcagggggctgcttgctttgggaacaatggctgagcatataaccataggttatggggaacaaaacaacatcaaagtcactgtatcaattgccatgaagacttgagggacctgaatctaccgattcatcttaaggcagcaggaccagtttgagtggcaacaatgcagcagcagaatcaatggaaacaacagaatgattgcaatgtccttttttttctcctgcttctgacttgataaaaggggaccgt

SEQ ID NO: 309 - DNA, 460 bp, Homo sapien
actttatagtttaggctggacattggaaaaaaaaaaaagccagaacaacatgtgatagataatatgattggctgcacacttccagactgatgaatgatgaacgtgatggactattgtatggagcacatcttcagcaagagggggaaatactcatcatttttggccagcagttgtttgatcaccaaacatcatgccagaatactcagcaaaccttcttagctcttgagaagtcaaagtccgggggaatttattcctggcaattttaattggactccttatgtgagagcagcggctacccagctggggtggtggagcgaacccgtcactagtggacatgcagtggcagagctcctggtaaccacctagaggaatacacaggcacatgtgtgatgccaagcgtgacacctgtagcactcaaatttgtcttgtttttgtctttcggtgtgtaagattcttaagt

SEQ ID NO: 310 - DNA, 539 bp, Homo sapien
acgggacttatcaaataaagataggaaaagaagaaaactcaaatattataggcagaaatgctaaaggttttaaaatatgtcaggattggaagaaggcatggataaagaacaaagttcagttaggaaagagaaacacagaaggaagagacacaataaaagtcattatgtattctgtgagaagtcagacagtaagatttgtgggaaatgggttggtttgttgtatggtatgtattttagcaataatctttatggcagagaaagctaaaatcctttagcttgcgtgaatgatcacttgctgaattcctcaaggtaggcatgatgaaggagggtttagaggagacacagacacaatgaactgacctagatagaaagccttagtatactcagctaggaatagtgattctgagggcacactgtgacatgattatgtcattacatgtatggtagtgatggggatgataggaaggaagaacttatggcatattttcacccccacaaaagtcagttaaatattgggacactaaccatccaggtcaaga

SEQ ID NO: 311 - DNA, 526 bp, Homo sapien
  misc_feature (1)...(526): n = A,T,C or G
caaatttgagccaatgacatagaattttacaaatcaagaagcttattctggggccatttcttttgacgttttctctaaactactaaagaggcattaatgatccataaattatattatctacatttacagcatttaaaatgtgttcagcatgaaatattagctacaggggaagctaaataaattaaacatggaataaagatttgtccttaaatataatctacaagaagactttgatatttgtttttcacaagtgaagcattcttataaagtgtcataacctttttggggaaactatgggaaaaaatggggaaactctgaagggttttaagtatcttacctgaagctacagactccataacctctctttacagggagctcctgcagcccctacagaaatgagtggctgagattcttgattgcacagcaagagcttctcatctaaaccctttccctttttagtatctgtgtatcaagtataaaagttctataaactgtagtntacttattttaatccccaaagcacagt

SEQ ID NO: 312 - DNA, 500 bp, Homo sapien
  misc_feature (1)...(500): n = A,T,C or G
cctctctctccccaccccctgactctagagaactgggttttctcccagtactccagcaattcatttctgaaagcagttgagccactttattccaaagtacactgcagatgttcaaactctccatttctctttcccttccacctgccagttttgctgactctcaacttgtcatgagtgtaagcattaaggacattatgcttcttcgattctgaagacaggccctgctcatggatgactctggcttcttaggaaaatatttttcttccaaaatcagtaggaaatctaaacttatcccctctttgcagatgtctagcagcttcagacatttggttaagaacccatgggaaaaaaaaaaatccttgctaatgtggtttcctttgtaaaccangattcttatttgnctggtatagaatatcagctctgaacgtgtggtaaagatttttgtgtttgaatataggagaaatcagtttgctgaaaagttagtcttaattatctattgg

SEQ ID NO: 313 - DNA, 718 bp, Homo sapien
  misc_feature (1)...(718): n = A,T,C or G
ggagatttgtgtggtttgcagccgagggagaccaggaagatctgcatggtgggaaggacctgatgatacagaggtgagaaataagaaaggctgctgactttaccatctgaggccacacatctgctgaaatggagataattaacatcactagaaacagcaagatgacaatataatgtctaagtagtgacatgtttttgcacatttccagcccttttaaatatccacacacacaggaagcacaaaaggaagcacagagatccctgggagaaatgcccggccgccatcttgggtcatcgatgagcctcgccctgtgcctgntcccgcttgtgagggaaggacattagaaaatgaattgatgtgttccttaaaggatggcaggaaaacagatcctgttgtggatatttatttgaacgggattacagatttgaaatgaagtcacaaagtgagcattaccaatgagaggaaaacagacgagaaaatcttgatggttcacaagacatgcaacaaacaaaatggaatactgtgatgacacgagcagccaactggggaggagataccacggggcagaggtcaggattctggccctgctgcctaactgtgcgttataccaatcatttctatttctaccctcaaacaagctgtngaatatctgacttacggttcttntggcccacattttcatnatccaccccntcnttttaannttantccaaantgt

SEQ ID NO: 314 - DNA, 358 bp, Homo sapien
gtttatttacattacagaaaaaacatcaagacaatgtatactatttcaaatatatccatacataatcaaatatagctgtagtacatgttttcattggtgtagattaccacaaatgcaaggcaacatgtgtagatctcttgtcttattcttttgtctataatactgtattgtgtagtccaagctctcggtagtccagccactgtgaaacatgctccctttagattaacctcgtggacgctcttgttgtattgctgaactgtagtgccctgtattttgcttctgtctgtgaattctgttgcttctggggcatttccttgtgatgcagaggaccaccacacagatgacagcaatctgaatt

SEQ ID NO: 315 - DNA, 341 bp, Homo sapien
taccacctccccgctggcactgatgagccgcatcaccatggtcaccagcaccatgaaggcataggtgatgatgaggacatggaatgggcccccaaggatggtctgtccaaagaagcgagtgacccccattctgaagatgtctggaacctctaccagcaggatgatgatagccccaatgacagtcaccagctccccgaccagccggatatcgtccttaggggtcatgtaggcttcctgaagtagcttctgctgtaagagggtgttgtcccgggggctcgtgcggttattggtcctgggcttgagggggcggtagatgcagcacatggtgaagcagatgatgt

SEQ ID NO: 316 - DNA, 151 bp, Homo sapien
agactgggcaagactcttacgccccacactgcaatttggtcttgttgccgtatccatttatgtgggcctttctcgagtttctgattataaacaccactggagcgatgtgttgactggactcattcagggagctctggttgcaatattagtt

SEQ ID NO: 317 - DNA, 151 bp, Homo sapien
agaactagtggatcctaatgaaatacctgaaacatatattggcatttatcaatggctcaaatcttcatttatctctggccttaaccctggctcctgaggctgcggccagcagatcccaggccagggctctgttcttgccacacctgcttga

SEQ ID NO: 318 - DNA, 151 bp, Homo sapien
actggtgggaggcgctgtttagttggctgttttcagaggggtctttcggagggacctcctgctgcaggctggagtgtctttattcctggcgggagaccgcacattccactgctgaggctgtgggggcggtttatcaggcagtgataaacat

SEQ ID NO: 319 - DNA, 151 bp, Homo sapien
aactagtggatccagagctataggtacagtgtgatctcagctttgcaaacacattttctacatagatagtactaggtattaatagatatgtaaagaaagaaatcacaccattaataatggtaagattgggtttatgtgattttagtgggta

SEQ ID NO: 320 - DNA, 150 bp, Homo sapien
aactagtggatccactagtccagtgtggtggaattccattgtgttggggttctagatcgcgagcggctgccctttttttttttttttttgggggggaattttttttttttaatagttattgagtgttctacagcttacagtaaataccat

SEQ ID NO: 321 - DNA, 151 bp, Homo sapien
agcaactttgtttttcatccaggttattttaggcttaggatttcctctcacactgcagtttagggtggcattgtaaccagctatggcataggtgttaaccaaaggctgagtaaacatgggtgcctctgagaaatcaaagtcttcatacact

SEQ ID NO: 322 - DNA, 151 bp, Homo sapien
  misc_feature (1)...(151): n = A,T,C or G
atccagcatcttctcctgtttcttgccttcctttttcttcttcttasattctgcttgaggtttgggcttggtcagtttgccacagggcttggagatggtgacagtcttctggcattcggcattgtgcagggctcgcttcanacttccagtt

SEQ ID NO: 323 - DNA, 151 bp, Homo sapien
  misc_feature (1)...(151): n = A,T,C or G
tgaggacttgtkttctttttctttatttttaatcctcttackttgtaaatatattgcctanagactcanttactacccagtttgtggttttwtgggagaaatgtaactggacagttagctgttcaatyaaaaagacacttancccatgtgg

SEQ ID NO: 324 - DNA, 461 bp, Homo sapien
  misc_feature (1)...(461): n = A,T,C or G
acctgtgtggaatttcagctttcctcatgcaaaaggattttgtatccccggcctacttgaagaagtggtcagctaaaggaatccaggttgttggttggactgttaatacctttgatgaaaagagttactacgaatcccatcttggttccagctatatcactgacagcatggtagaagactgcgaacctcacttctagactttcacggtgggacgaaacgggttcagaaactgccaggggcctcatacagggatatcaaaataccctttgtgctacccaggccctggggaatcaggtgactcacacaaatgcaatagttggtcactgcatttttacctgaaccaaagctaaacccggtgttgccaccatgcaccatggcatgccagagttcaacactgttgctcttgaaaattgggtctgaaaaaacgcacaagagcccctgccctgccctagctgangcac

SEQ ID NO: 325 - DNA, 400 bp, Homo sapien
acactgtttccatgttatgtttctacacattgctacctcagtgctcctggaaacttagcttttgatgtctccaagtagtccaccttcatttaactctttgaaactgtatcatctttgccaagtaagagtggtggcctatttcagctgctttgacaaaatgactggctcctgacttaacgttctataaatgaatgtgctgaagcaaagtgcccatggtggcggcgaagaagagaaagatgtgttttgttttggactctctgtggtcccttccaatgctgtgggtttccaaccaggggaagggtcccttttgcattgccaagtgccataaccatgagcactacgctaccatggttctgcctcctggccaagcaggctggtttgcaagaatgaaatgaatgat

SEQ ID NO: 326 - DNA, 1215 bp, Homo sapien
ggaggactgcagcccgcactcgcagccctggcaggcggcactggtcatggaaaacgaattgttctgctcgggcgtcctggtgcatccgcagtgggtgctgtcagccgcacactgtttccagaactcctacaccatcgggctgggcctgcacagtcttgaggccgaccaagagccagggagccagatggtggaggccagcctctccgtacggcacccagagtacaacagacccttgctcgctaacgacctcatgctcatcaagttggacgaatccgtgtccgagtctgacaccatccggagcatcagcattgcttcgcagtgccctaccgcggggaactcttgcctcgtttctggctggggtctgctggcgaacggcagaatgcctaccgtgctgcagtgcgtgaacgtgtcggtggtgtctgaggaggtctgcagtaagctctatgacccgctgtaccaccccagcatgttctgcgccggcggagggcaagaccagaaggactcctgcaacggtgactctggggggcccctgatctgcaacgggtacttgcagggccttgtgtctttcggaaaagccccgtgtggccaagttggcgtgccaggtgtctacaccaacctctgcaaattcactgagtggatagagaaaaccgtccaggccagttaactctggggactgggaacccatgaaattgacccccaaatacatcctgcggaaggaattcaggaatatctgttcccagcccctcctccctcaggcccaggagtccaggcccccagcccctcctccctcaaaccaagggtacagatccccagcccctcctccctcagacccaggagtccagaccccccagcccctcctccctcagacccaggagtccagcccctcctccctcagacccaggagtccagaccccccagcccctcctccctcagacccaggggtccaggcccccaacccctcctccctcagactcagaggtccaagcccccaacccctccttccccagacccagaggtccaggtcccagcccctcctccctcagacccagcggtccaatgccacctagactctccctgtacacagtgcccccttgtggcacgttgacccaaccttaccagttggtttttcattttttgtccctttcccctagatccagaaataaagtctaagagaagcgcaaaaaaaaaaaaaaaaaaaaaaaaaaaaaaaaaaaa

SEQ ID NO: 327 - protein, 220 aa, Homo sapien
EDCSPHSQPWQAALVMENELFCSGVLVHPQWVLSAAHCFQNSYTIGLGLHSLEADQEPGSQMVEASLSVRHPEYNRPLLANDLMLIKLDESVSESDTIRSISIASQCPTAGNSCLVSGWGLLANGRMPTVLQCVNVSVVSEEVCSKLYDPLYHPSMFCAGGGQDQKDSCNGDSGGPLICNGYLQGLVSFGKAPCGQVGVPGVYTNLCKFTEWIEKTVQAS

SEQ ID NO: 328 - DNA, 234 bp, Homo sapien
cgctcgtctctggtagctgcagccaaatcataaacggcgaggactgcagcccgcactcgcagccctggcaggcggcactggtcatggaaaacgaattgttctgctcgggcgtcctggtgcatccgcagtgggtgctgtcagccacacactgtttccagaactcctacaccatcgggctgggcctgcacagtcttgaggccgaccaagagccagggagccagatggtggaggcca

SEQ ID NO: 329 - protein, 77 aa, Homo sapien
LVSGSCSQIINGEDCSPHSQPWQAALVMENELFCSGVLVHPQWVLSATHCFQNSYTIGLGLHSLEADQEPGSQMVEA

SEQ ID NO: 330 - DNA, 70 bp, Homo sapien
cccaacacaatggcccgatcccatccctgactccgccctcaggatcgctcgtctctggtagctgcagcca

SEQ ID NO: 331 - protein, 22 aa, Homo sapien
QHNGPIPSLTPPSGSLVSGSCS

SEQ ID NO: 332 - DNA, 2507 bp, Homo sapien
tggtgccgctgcagccggcagagatggttgagctcatgttcccgctgttgctcctccttctgcccttccttctgtatatggctgcgccccaaatcaggaaaatgctgtccagtggggtgtgtacatcaactgttcagcttcctgggaaagtagttgtggtcacaggagctaatacaggtatcgggaaggagacagccaaagagctggctcagagaggagctcgagtatatttagcttgccgggatgtggaaaagggggaattggtggccaaagagatccagaccacgacagggaaccagcaggtgttggtgcggaaactggacctgtctgatactaagtctattcgagcttttgctaagggcttcttagctgaggaaaagcacctccacgttttgatcaacaatgcaggagtgatgatgtgtccgtactcgaagacagcagatggctttgagatgcacataggagtcaaccacttgggtcacttcctcctaacccatctgctgctagagaaactaaaggaatcagccccatcaaggatagtaaatgtgtcttccctcgcacatcacctgggaaggatccacttccataacctgcagggcgagaaattctacaatgcaggcctggcctactgtcacagcaagctagccaacatcctcttcacccaggaactggcccggagactaaaaggctctggcgttacgacgtattctgtacaccctggcacagtccaatctgaactggttcggcactcatctttcatgagatggatgtggtggcttttctcctttttcatcaagactcctcagcagggagcccagaccagcctgcactgtgccttaacagaaggtcttgagattctaagtgggaatcatttcagtgactgtcatgtggcatgggtctctgcccaagctcgtaatgagactatagcaaggcggctgtgggacgtcagttgtgacctgctgggcctcccaatagactaacaggcagtgccagttggacccaagagaagactgcagcagactacacagtacttcttgtcaaaatgattctccttcaaggttttcaaaacctttagcacaaagagagcaaaaccttccagccttgcctgcttggtgtccagttaaaactcagtgtactgccagattcgtctaaatgtctgtcatgtccagatttactttgcttctgttactgccagagttactagagatatcataataggataagaagaccctcatatgacctgcacagctcattttccttctgaaagaaactactacctaggagaatctaagctatagcagggatgatttatgcaaatttgaactagcttctttgttcacaattcagttcctcccaaccaaccagtcttcacttcaagagggccacactgcaacctcagcttaacatgaataacaaagactggctcaggagcagggcttgcccaggcatggtggatcaccggaggtcagtagttcaagaccagcctggccaacatggtgaaaccccacctctactaaaaattgtgtatatctttgtgtgtcttcctgtttatgtgtgccaagggagtattttcacaaagttcaaaacagccacaataatcagagatggagcaaaccagtgccatccagtctttatgcaaatgaaatgctgcaaagggaagcagattctgtatatgttggtaactacccaccaagagcacatgggtagcagggaagaagtaaaaaaagagaaggagaatactggaagataatgcacaaaatgaagggactagttaaggattaactagccctttaaggattaactagttaaggattaatagcaaaagayattaaatatgctaacatagctatggaggaattgagggcaagcacccaggactgatgaggtcttaacaaaaaccagtgtggcaaaaaaaaaaaaaaaaaaaaaaaaaaatcctaaaaacaaacaaacaaaaaaaacaattcttcattcagaaaaattatcttagggactgatattggtaattatggtcaatttaataatattttggggcatttccttacattgtcttgacaagattaaaatgtctgtgccaaaattttgtattttatttggagacttcttatcaaaagtaatgctgccaaaggaagtctaaggaattagtagtgttcccatcacttgtttggagtgtgctattctaaaagattttgatttcctggaatgacaattatattttaactttggtgggggaaagagttataggaccacagtcttcacttctgatacttgtaaattaatcttttattgcacttgttttgaccattaagctatatgtttagaaatggtcattttacggaaaaattagaaaaattctgataatagtgcagaataaatgaattaatgttttacttaatttatattgaactgtcaatgacaaataaaaattctttttgattattttttgttttcatttaccagaataaaaacgtaagaattaaaagtttgattacaaaaaaaaaaaaaaa

SEQ ID NO: 333 - DNA, 3030 bp, Homo sapien
gcaggcgacttgcgagctgggagcgatttaaaacgctttggattcccccggcctgggtggggagagcgagctgggtgccccctagattccccgcccccgcacctcatgagccgaccctcggctccatggagcccggcaattatgccaccttggatggagccaaggatatcgaaggcttgctgggagcgggaggggggcggaatctggtcgcccactcccctctgaccagccacccagcggcgcctacgctgatgcctgctgtcaactatgcccccttggatctgccaggctcggcggagccgccaaagcaatgccacccatgccctggggtgccccaggggacgtccccagctcccgtgccttatggttactttggaggcgggtactactcctgccgagtgtcccggagctcgctgaaaccctgtgcccaggcagccaccctggccgcgtaccccgcggagactcccacggccggggaagagtaccccagycgccccactgagtttgccttctatccgggatatccgggaacctaccagcctatggccagttacctggacgtgtctgtggtgcagactctgggtgctcctggagaaccgcgacatgactccctgttgcctgtggacagttaccagtcttgggctctcgctggtggctggaacagccagatgtgttgccagggagaacagaacccaccaggtcccttttggaaggcagcatttgcagactccagcgggcagcaccctcctgacgcctgcgcctttcgtcgcggccgcaagaaacgcattccgtacagcaaggggcagttgcgggagctggagcgggagtatgcggctaacaagttcatcaccaaggacaagaggcgcaagatctcggcagccaccagcctctcggagcgccagattaccatctggtttcagaaccgccgggtcaaagagaagaaggttctcgccaaggtgaagaacagcgctaccccttaagagatctccttgcctgggtgggaggagcgaaagtgggggtgtcctggggagaccaggaacctgccaagcccaggctggggccaaggactctgctgagaggcccctagagacaacacccttcccaggccactggctgctggactgttcctcaggagcggcctgggtacccagtatgtgcagggagacggaaccccatgtgacagcccactccaccagggttcccaaagaacctggcccagtcataatcattcatcctgacagtggcaataatcacgataaccagtactagctgccatgatcgttagcctcatattttctatctagagctctgtagagcactttagaaaccgctttcatgaattgagctaattatgaataaatttggaaggcgatccctttgcagggaagctttctctcagacccccttccattacacctctcaccctggtaacagcaggaagactgaggagaggggaacgggcagattcgttgtgtggctgtgatgtccgtttagcatttttctcagctgacagctgggtaggtggacaattgtagaggctgtctcttcctccctccttgtccaccccatagggtgtacccactggtcttggaagcacccatccttaatacgatgatttttctgtcgtgtgaaaatgaagccagcaggctgcccctagtcagtccttccttccagagaaaaagagatttgagaaagtgcctgggtaattcaccattaatttcctcccccaaactctctgagtcttcccttaatatttctggtggttctgaccaaagcaggtcatggtttgttgagcatttgggatcccagtgaagtagatgtttgtagccttgcatacttagcccttcccaggcacaaacggagtggcagagtggtgccaaccctgttttcccagtccacgtagacagattcacagtgcggaattctggaagctggagacagacgggctctttgcagagccgggactctgagagggacatgagggcctctgcctctgtgttcattctctgatgtcctgtacctgggctcagtgcccggtgggactcatctcctggccgcgcagcaaagccagcgggttcgtgctggtccttcctgcaccttaggctgggggtggggggcctgccggcgcattctccacgattgagcgcacaggcctgaagtctggacaacccgcagaaccgaagctccgagcagcgggtcggtggcgagtagtggggtcggtggcgagcagttggtggtgggccgcggccgccactacctcgaggacatttccctcccggagccagctctcctagaaaccccgcggcggccgccgcagccaagtgtttatggcccgcggtcgggtgggatcctagccctgtctcctctcctgggaaggagtgagggtgggacgtgacttagacacctacaaatctatttaccaaagaggagcccgggactgagggaaaaggccaaagagtgtgagtgcatgcggactgggggttcaggggaagaggacgaggaggaggaagatgaggtcgatttcctgatttaaaaaatcgtccaagccccgtggtccagcttaaggtcctcggttacatgcgccgctcagagcaggtcactttctgccttccacgtcctccttcaaggaagccccatgtgggtagctttcaatatcgcaggttcttactcctctgcctctataagctcaaacccaccaacgatcgggcaagtaaaccccctccctcgccgacttcggaactggcgagagttcagcgcagatgggcctgtggggagggggcaagatagatgagggggagcggcatggtgcggggtgaccccttggagagaggaaaaaggccacaagaggggctgccaccgccactaacggagatggccctggtagagacctttgggggtctggaacctctggactccccatgctctaactcccacactctgctatcagaaacttaaacttgaggattttctctgtttttcactcgcaataaaytcagagcaaacaaaaaaaaaaaaaaaaaaaaactcgag

SEQ ID NO: 334 - DNA, 2417 bp, Homo sapien
ggcggccgctctagagctagtgggatcccccgggctgcacgaattcggcacgagtgagttggagttttacctgtattgttttaatttcaacaagcctgaggactagccacaaatgtacccagtttacaaatgaggaaacaggtgcaaaaaggttgttacctgtcaaaggtcgtatgtggcagagccaagatttgagcccagttatgtctgatgaacttagcctatgctctttaaacttctgaatgctgaccattgaggatatctaaacttagatcaattgcattttccctccaagactatttacttatcaatacaataataccacctttaccaatctattgttttgatacgagactcaaatatgccagatatatgtaaaagcaacctacaagctctctaatcatgctcacctaaaagattcccgggatctaataggctcaaagaaacttcttctagaaatataaaagagaaaattggattatgcaaaaattcattattaatttttttcatccatcctttaattcagcaaacatttatctgttgttgactttatgcagtatggccttttaaggattgggggacaggtgaagaacggggtgccagaatgcatcctcctactaatgaggtcagtacacatttgcattttaaaatgccctgtccagctgggcatggtggatcatgcctgtaatctcaacattggaaggccaaggcaggaggattgcttcagcccaggagttcaagaccagcctgggcaacatagaaagaccccatctctcaatcaatcaatcaatgccctgtctttgaaaataaaactctttaagaaaggtttaatgggcagggtgtggtagctcatgcctataatacagcactttgggaggctgaggcaggaggatcactttagcccagaagttcaagaccagcctgggcaacaagtgacacctcatctcaattttttaataaaatgaatacatacataaggaaagataaaaagaaaagtttaatgaaagaatacagtataaaacaaatctcttggacctaaaagtatttttgttcaagccaaatattgtgaatcacctctctgtgttgaggatacagaatatctaagcccaggaaactgagcagaaagttcatgtactaactaatcaacccgaggcaaggcaaaaatgagactaactaatcaatccgaggcaaggggcaaattagacggaacctgactctggtctattaagcgacaactttccctctgttgtatttttcttttattcaatgtaaaaggataaaaactctctaaaactaaaaacaatgtttgtcaggagttacaaaccatgaccaactaattatggggaatcataaaatatgactgtatgagatcttgatggtttacaaagtgtacccactgttaatcactttaaacattaatgaacttaaaaatgaatttacggagattggaatgtttctttcctgttgtattagttggctcaggctgccataacaaaataccacagactgggaggcttaagtaacagaaattcatttctcacagttctgggggctggaagtccacgatcaaggtgcaggaaaggcaggcttcattctgaggcccctctcttggctcacatgtggccaccctcccactgcgtgctcacatgacctctttgtgctcctggaaagagggtgtgggggacagagggaaagagaaggagagggaactctctggtgtctcgtctttcaaggaccctaacctgggccactttggcccaggcactgtggggtggggggttgtggctgctctgctctgagtggccaagataaagcaacagaaaaatgtccaaagctgtgcagcaaagacaagccaccgaacagggatctgctcatcagtgtggggacctccaagtcggccaccctggaggcaagcccccacagagcccatgcaaggtggcagcagcagaagaagggaattgtccctgtccttggcacattcctcaccgacctggtgatgctggacactgcgatgaatggtaatgtggatgagaatatgatggactcccagaaaaggagacccagctgctcaggtggctgcaaatcattacagccttcatcctggggaggaactgggggcctggttctgggtcagagagcagcccagtgagggtgagagctacagcctgtcctgccagctggatccccagtcccggtcaaccagtaatcaaggctgagcagatcaggcttcccggagctggtcttgggaagccagccctggggtgagttggctcctgctgtggtactgagacaatattgtcataaattcaatgcgcccttgtatccctttttcttttttatctgtctacatctataatcactatgcatactagtctttgttagtgtttctattcmacttaatagagatatgttatact

SEQ ID NO: 335 - DNA, 2984 bp, Homo sapien
atccctccttccccactctcctttccagaaggcacttggggtcttatctgttggactctgaaaacacttcaggcgcccttccaaggcttccccaaacccctaagcagccgcagaagcgctcccgagctgccttctcccacactcaggtgatcgagttggagaggaagttcagccatcagaagtacctgtcggcccctgaacgggcccacctggccaagaacctcaagctcacggagacccaagtgaagatatggttccagaacagacgctataagactaagcgaaagcagctctcctcggagctgggagacttggagaagcactcctctttgccggccctgaaagaggaggccttctcccgggcctccctggtctccgtgtataacagctatccttactacccatacctgtactgcgtgggcagctggagcccagctttttggtaatgccagctcaggtgacaaccattatgatcaaaaactgccttccccagggtgtctctatgaaaagcacaaggggccaaggtcagggagcaagaggtgtgcacaccaaagctattggagatttgcgtggaaatctcasattcttcactggtgagacaatgaaacaacagagacagtgaaagttttaatacctaagtcattcccccagtgcatactgtaggtcattttttttgcttctggctacctgtttgaaggggagagagggaaaatcaagtggtattttccagcactttgtatgattttggatgagctgtacacccaaggattctgttctgcaactccatcctcctgtgtcactgaatatcaactctgaaagagcaaacctaacaggagaaaggacaaccaggatgaggatgtcaccaactgaattaaacttaagtccagaagcctcctgttggccttggaatatggccaaggctctctctgtccctgtaaaagagaggggcaaatagagagtctccaagagaacgccctcatgctcagcacatatttgcatgggagggggagatgggtgggaggagatgaaaatatcagcttttcttattcctttttattccttttaaaatggtatgccaacttaagtatttacagggtggcccaaatagaacaagatgcactcgctgtgattttaagacaagctgtataaacagaactccactgcaagagggggggccgggccaggagaatctccgcttgtccaagacaggggcctaaggagggtctccacactgctgctaggggctgttgcatttttttattagtagaaagtggaaaggcctcttctcaacttttttcccttgggctggagaatttagaatcagaagtttcctggagttttcaggctatcatatatactgtatcctgaaaggcaacataattcttccttccctccttttaaaattttgtgttcctttttgcagcaattactcactaaagggcttcattttagtccagatttttagtctggctgcacctaacttatgcctcgcttatttagcccgagatctggtctttttttttttttttttttttccgtctccccaaagctttatctgtcttgactttttaaaaaagtttgggggcagattctgaattggctaaaagacatgcatttttaaaactagcaactcttatttctttcctttaaaaatacatagcattaaatcccaaatcctatttaaagacctgacagcttgagaaggtcactactgcatttataggaccttctggtggttctgctgttacgtttgaagtctgacaatccttgagaatctttgcatgcagaggaggtaagaggtattggattttcacagaggaagaacacagcgcagaatgaagggccaggcttactgagctgtccagtggagggctcatgggtgggacatggaaaagaaggcagcctaggccctggggagcccagtccactgagcaagcaagggactgagtgagccttttgcaggaaaaggctaagaaaaaggaaaaccattctaaaacacaacaagaaactgtccaaatgctttgggaactgtgtttattgcctataatgggtccccaaaatgggtaacctagacttcagagagaatgagcagagagcaaaggagaaatctggctgtccttccattttcattctgttatctcaggtgagctggtagaggggagacattagaaaaaaatgaaacaacaaaacaattactaatgaggtacgctgaggcctgggagtctcttgactccactacttaattccgtttagtgagaaacctttcaattttcttttattagaagggccagcttactgttggtggcaaaattgccaacataagttaatagaaagttggccaatttcaccccattttctgtggtttgggctccacattgcaatgttcaatgccacgtgctgctgacaccgaccggagtactagccagcacaaaaggcagggtagcctgaattgctttctgctctttacatttcttttaaaataagcatttagtgctcagtccctactgagtactctttctctcccctcctctgaatttaattctttcaacttgcaatttgcaaggattacacatttcactgtgatgtatattgtgttgcaaaaaaaaaaaaaagtgtctttgtttaaaattacttggtttgtgaatccatcttgctttttccccattggaactagtcattaacccatctctgaactggtagaaaaacatctgaagagctagtctatcagcatctgacaggtgaattggatggttctcagaaccatttcacccagacagcctgtttctatcctgtttaataaattagtttgggttctctacatgcataacaaaccctgctccaatctgtcacataaaagtctgtgacttgaagtttagtcagcacccccaccaaactttatttttctatgtgttttttgcaacatatgagtgttttgaaaataaagtacccatgtctttattagaaaaaaaaaaaaaaaaaaaaaa

SEQ ID NO: 336 - protein, 147 aa, Homo sapien
PSFPTLLSRRHLGSYLLDSENTSGALPRLPQTPKQPQKRSRAAFSHTQVIELERKFSHQKYLSAPERAHLAKNLKLTETQVKIWFQNRRYKTKRKQLSSELGDLEKHSSLPALKEEAFSRASLVSVYNSYPYYPYLYCVGSWSPAFW

SEQ ID NO: 337 - protein, 9 aa, Homo sapien
ALTGFTFSA

SEQ ID NO: 338 - protein, 9 aa, Homo sapien
LLANDLMLI

SEQ ID NO: 339 - protein, 318 aa, Homo sapien
MVELMFPLLLLLLPFLLYMAAPQIRKMLSSGVCTSTVQLPGKVVVVTGANTGIGKETAKELAQRGARVYLACRDVEKGELVAKEIQTTTGNQQVLVRKLDLSDTKSIRAFAKGFLAEEKHLHVLINNAGVMMCPYSKTADGFEMHIGVNHLGHFLLTHLLLEKLKESAPSRIVNVSSLAHHLGRIHFHNLQGEKFYNAGLAYCHSKLANILFTQELARRLKGSGVTTYSVHPGTVQSELVRHSSFMRWMWWLFSFFIKTPQQGAQTSLHCALTEGLEILSGNHFSDCHVAWVSAQARNETIARRLWDVSCDLLGLPID

SEQ ID NO: 340 - DNA, 483 bp, Homo sapien
gccgaggtctgccttcacacggaggacacgagactgcttcctcaagggctcctgcctgcctggacactggtgggaggcgctgtttagttggctgttttcagaggggtctttcggagggacctcctgctgcaggctggagtgtctttattcctggcgggagaccgcacattccactgctgaggttgtgggggcggtttatcaggcagtgataaacataagatgtcatttccttgactccggccttcaattttctctttggctgacgacggagtccgtggtgtcccgatgtaactgacccctgctccaaacgtgacatcactgatgctcttctcgggggtgctgatggcccgcttggtcacgtgctcaatctcgccattcgactcttgctccaaactgtatgaagacacctgactgcacgttttttctgggcttccagaatttaaagtgaaaggcagcactcctaagctccgactccgatgcctg

SEQ ID NO: 341 - DNA, 344 bp, Homo sapien
ctgctgctgagtcacagatttcattataaatagcctccctaaggaaaatacactgaatgctatttttactaaccattctatttttatagaaatagctgagagtttctaaaccaactctctgctgccttacaagtattaaatattttacttctttccataaagagtagctcaaaatatgcaattaatttaataatttctgatgatggttttatctgcagtaatatgtatatcatctattagaatttacttaatgaaaaactgaagagaacaaaatttgtaaccactagcacttaagtactcctgattcttaacattgtctttaatgaccacaagacaaccaacag

SEQ ID NO: 342 - DNA, 592 bp, Homo sapien
acagcaaaaaagaaactgagaagcccaatytgctttcttgttaacatccacttatccaaccaatgtggaaacttcttatacttggttccattatgaagttggacaattgctgctatcacacctggcaggtaaaccaatgccaagagagtgatggaaaccattggcaagactttgttgatgaccaggattggaattttataaaaatattgttgatgggaagttgctaaagggtgaattacttccctcagaagagtgtaaagaaaagtcagagatgctataatagcagctattttaattggcaagtgccactgtggaaagagttcctgtgtgtgctgaagttctgaagggcagtcaaattcatcagcatgggctgtttggtgcaaatgcaaaagcacaggtctttttagcatgctggtctctcccgtgtccttatgcaaataatcgtcttcttctaaatttctcctaggcttcattttccaaagttcttcttggtttgtgatgtcttttctgctttccattaattctataaaatagtatggcttcagccacccactcttcgccttagcttgaccgtgagtctcggctgccgctg

SEQ ID NO: 343 - DNA, 382 bp, Homo sapien
ttcttgacctcctcctccttcaagctcaaacaccacctcccttattcaggaccggcacttcttaatgtttgtggctttctctccagcctctcttaggaggggtaatggtggagttggcatcttgtaactctcctttctcctttcttcccctttctctgcccgcctttcccatcctgctgtagacttcttgattgtcagtctgtgtcacatccagtgattgttttggtttctgttccctttctgactgcccaaggggctcagaaccccagcaatcccttcctttcactaccttcttttttgggggtagttggaagggactgaaattgtggggggaaggtaggaggcacatcaataaagaggaaaccaccaagctgaaaaaaaa

SEQ ID NO: 344 - DNA, 536 bp, Homo sapien
ctgggcctgaagctgtagggtaaatcagaggcaggcttctgagtgatgagagtcctgagacaataggccacataaacttggctggatggaacctcacaataaggtggtcacctcttgtttgtttagggggatgccaaggataaggccagctcagttatatgaagagaagcagaacaaacaagtctttcagagaaatggatgcaatcagagtgggatcccggtcacatcaaggtcacactccaccttcatgtgcctgaatggttgccaggtcagaaaaatccaccccttacgagtgcggcttcgaccctatatcccccgcccgcgtccctttctccataaaattcttcttagtagctattaccttcttattatttgatctagaaattgccctccttttacccctaccatgagccctacaaacaactaacctgccactaatagttatgtcatccctcttattaatcatcatcctagccctaagtctggcctatgagtgactacaaaaaggattagactgagccgaataacaaaaaaaa

SEQ ID NO: 345 - DNA, 251 bp, Homo sapien
accttttgaggtctctctcaccacctccacagccaccgtcaccgtgggatgtgctggatgtgaatgaagcccccatctttgtgcctcctgaaaagagagtggaagtgtccgaggactttggcgtgggccaggaaatcacatcctacactgcccaggagccagacacatttatggaacagaaaataacatatcggatttggagagacactgccaactggctggagattaatccggacactggtgccatttcc

SEQ ID NO: 346 - DNA, 282 bp, Homo sapien
  misc_feature (1)...(282): n = A,T,C or G
cgcgtctctgacactgtgatcatgacaggggttcaaacagaaagtgcctgggccctccttctaagtcttgttaccaaaaaaaggaaaaagaaaagatcttctcagttacaaattctgggaagggagactatacctggctcttgccctaagtgagaggtcttccctcccgcaccaaaaaatagaaaggctttctatttcactggcccaggtagggggaaggagagtaactttgagtctgtgggtctcatttcccaaggtgccttcaatgctcatnaaaaccaa

SEQ ID NO: 347 - DNA, 201 bp, Homo sapien
  misc_feature (1)...(201): n = A,T,C or G
acacacataatattataaaatgccatctaattggaaggagctttctatcattgcaagtcataaatataacttttaaaanantactancagcttttacctangctcctaaatgcttgtaaatctgagactgactggacccacccagacccagggcaaagatacatgttaccatatcatctttataaagaatttttttttgtc

SEQ ID NO: 348 - DNA, 251 bp, Homo sapien
ctgttaatcacaacatttgtgcatcacttgtgccaagtgagaaaatgttctaaaatcacaagagagaacagtgccagaatgaaactgaccctaagtcccaggtgcccctgggcaggcagaaggagacactcccagcatggaggagggtttatcttttcatcctaggtcaggtctacaatgggggaaggttttattatagaactcccaacagcccacctcactcctgccacccacccgatggccctgcctcc

SEQ ID NO: 349 - DNA, 251 bp, Homo sapien
taaaaatcaagccatttaattgtatctttgaaggtaaacaatatatgggagctggatcacaacccctgaggatgccagagctatgggtccagaacatggtgtggtattatcaacagagttcagaagggtctgaactctacgtgttaccagagaacataatgcaattcatgcattccacttagcaattttgtaaaataccagaaacagaccccaagagtctttcaagatgaggaaaattcaactcctggttt

SEQ ID NO: 350 - DNA, 908 bp, Homo sapien
ctggacactttgcgagggcttttgctggctgctgctgctgcccgtcatgctactcatcgtagcccgcccggtgaagctcgctgctttccctacctccttaagtgactgccaaacgcccaccggctggaattgctctggttatgatgacagagaaaatgatctcttcctctgtgacaccaacacctgtaaatttgatggggaatgtttaagaattggagacactgtgacttgcgtctgtcagttcaagtgcaacaatgactatgtgcctgtgtgtggctccaatggggagagctaccagaatgagtgttacctgcgacaggctgcatgcaaacagcagagtgagatacttgtggtgtcagaaggatcatgtgccacagtccatgaaggctctggagaaactagtcaaaaggagacatccacctgtgatatttgccagtttggtgcagaatgtgacgaagatgccgaggatgtctggtgtgtgtgtaatattgactgttctcaaaccaacttcaatcccctctgcgcttctgatgggaaatcttatgataatgcatgccaaatcaaagaagcatcgtgtcagaaacaggagaaaattgaagtcatgtctttgggtcgatgtcaagataacacaactacaactactaagtctgaagatgggcattatgcaagaacagattatgcagagaatgctaacaaattagaagaaagtgccagagaacaccacataccttgtccggaacattacaatggcttctgcatgcatgggaagtgtgagcattctatcaatatgcaggagccatcttgcaggtgtgatgctggttatactggacaacactgtgaaaaaaaggactacagtgttctatacgttgttcccggtcctgtacgatttcagtatgtcttaatcgcag

SEQ ID NO: 351 - DNA, 472 bp, Homo sapien
ccagttatttgcaagtggtaagagcctatttaccataaataatactaagaaccaactcaagtcaaaccttaatgccattgttattgtgaattaggattaagtagtaattttcaaaattcacattaacttgattttaaaatcagwtttgygagtcatttaccacaagctaaatgtgtacactatgataaaaacaaccattgtattcctgtttttctaaacagtcctaatttctaacactgtatatatccttcgacatcaatgaactttgttttcttttactccagtaataaagtaggcacagatctgtccacaacaaacttgccctctcatgccttgcctctcaccatgctctgctccaggtcagcccccttttggcctgtttgttttgtcaaaaacctaatctgcttcttgcttttcttggtaatatatatttagggaagatgttgctttgcccacacacgaagcaaagtaa

SEQ ID NO: 352 - DNA, 251 bp, Homo sapien
ctcaaagctaatctctcgggaatcaaaccagaaaagggcaaggatcttaggcatggtggatgtggataaggccaggtcaatggctgcaagcatgcagagaaagaggtacatcggagcgtgcaggctgcgttccgtccttacgatgaagaccacgatgcagtttccaaacattgccactacatacatggaaaggagggggaagccaacccagaaatgggctttctctaatcctgggataccaataagcacaa

SEQ ID NO: 353 - DNA, 436 bp, Homo sapien
ttttttttttttttttttttttttttacaacaatgcagtcatttatttattgagtatgtgcacattatggtattattactatactgattatatttatcatgtgacttctaattaraaaatgtatccaaaagcaaaacagcagatatacaaaattaaagagacagaagatagacattaacagataaggcaacttatacattgacaatccaaatccaatacatttaaacatttgggaaatgagggggacaaatggaagccaratcaaatttgtgtaaaactattcagtatgtttcccttgcttcatgtctgaraaggctctcccttcaatggggatgacaaactccaaatgccacacaaatgttaacagaatactagattcacactggaacgggggtaaagaagaaattattttctataaaagggctcctaatgtagt

SEQ ID NO: 354 - DNA, 854 bp, Homo sapien
ccttttctagttcaccagttttctgcaaggatgctggttagggagtgtctgcaggaggagcaagtctgaaaccaaatctaggaaacataggaaacgagccaggcacagggctggtgggccatcagggaccaccctttgggttgatattttgcttaatctgcatcttttgagtaagatcatctggcagtagaagctgttctccaggtacatttctctagctcatgtacaaaaacatcctgaaggactttgtcaggtgccttgctaaaagccagatgcgttcggcacttccttggtctgaggttaattgcacacctacaggcactgggctcatgctttcaagtattttgtcctcactttagggtgagtgaaagatccccattataggagcacttgggagagatcatataaaagctgactcttgagtacatgcagtaatggggtagatgtgtgtggtgtgtcttcattcctgcaagggtgcttgttagggagtgtttccaggaggaacaagtctgaaaccaatcatgaaataaatggtaggtgtgaactggaaaactaattcaaaagagagatcgtgatatcagtgtggttgatacaccttggcaatatggaaggctctaatttgcccatatttgaaataataattcagctttttgtaatacaaaataacaaaggattgagaatcatggtgtctaatgtataaaagacccaggaaacataaatatatcaactgcataaatgtaaaatgcatgtgacccaagaaggccccaaagtggcagacaacattgtacccattttcccttccaaaatgtgagcggcgggcctgctgctttcaaggctgtcacacgggatgtcag

SEQ ID NO: 355 - DNA, 676 bp, Homo sapien
gaaattaagtatgagctaaattccctgttaaaacctctaggggtgacagatctcttcaaccaggtcaaagctgatctttctggaatgtcaccaaccaagggcctatatttatcaaaagccatccacaagtcatacctggatgtcagcgaagagggcacggaggcagcagcagccactggggacagcatcgctgtaaaaagcctaccaatgagagctcagttcaaggcgaaccaccccttcctgttctttataaggcacactcataccaacacgatcctattctgtggcaagcttgcctctccctaatcagatggggttgagtaaggctcagagttgcagatgaggtgcagagacaatcctgtgactttcccacggccaaaaagctgttcacacctcacgcacctctgtgcctcagtttgctcatctgcaaaataggtctaggatttcttccaaccatttcatgagttgtgaagctaaggctttgttaatcatggaaaaaggtagacttatgcagaaagcctttctggctttcttatctgtggtgtctcatttgagtgctgtccagtgacatgatcaagtcaatgagtaaaattttaagggattagattttcttgacttgtatgtatctgtgagatcttgaataagtgacctgacatctctgcttaaagaaaaccag

SEQ ID NO: 356 - DNA, 574 bp, Homo sapien
tttttttttttttttcaggaaaacattctcttactttatttgcatctcagcaaaggttctcatgtggcacctgactggcatcaaaccaaagttcgtaggccaacaaagatgggccactcacaagcttcccatttgtagatctcagtgcctatgagtatctgacacctgttcctctcttcagtctcttagggaggcttaaatctgtctcaggtgtgctaagagtgccagcccaaggkggtcaaaagtccacaaaactgcagtctttgctgggatagtaagccaagcagtgcctggacagcagagttcttttcttgggcaacagataaccagacaggactctaatcgtgctcttattcaacattcttctgtctctgcctagactggaataaaaagccaatctctctcgtggcacagggaaggagatacaagctcgtttacatgtgatagatctaacaaaggcatctaccgaagtctggtctggatagacggcacagggagctcttaggtcagcgctgctggttggaggacattcctgagtccagctttgcagcctttgtgcaacagtactttccca

SEQ ID NO: 357 - DNA, 393 bp, Homo sapien
tttttttttttttttttttttttttttttttacagaatataratgctttatcactgkacttaatatggkgkcttgttcactatacttaaaaatgcaccactcataaatatttaattcagcaagccacaaccaaracttgattttatcaacaaaaacccctaaatataaacggsaaaaaagatagatataattattccagtttttttaaaacttaaaaratattccattgccgaattaaraaraarataagtgttatatggaaagaagggcattcaagcacactaaaraaacctgaggkaagcataatctgtacaaaattaaactgtcctttttggcattttaacaaatttgcaacgktcttttttttctttttctgtttttttttttttttac

SEQ ID NO: 358 - DNA, 630 bp, Homo sapien
acagggtaaacaggaggatccttgctctcacggagcttacattctagcaggaggacaatattaatgtttataggaaaatgatgagtttatgacaaaggaagtagatagtgttttacaagagcatagagtagggaagctaatccagcacagggaggtcacagagacatccctaaggaagtggagtttaaactgagagaagcaagtgcttaaactgaaggatgtgttgaagaagaagggagagtagaacaatttgggcagagggaaccttatagaccctaaggtgggaaggttcaaagaactgaaagagagctagaacagctggagccgttctccggtgtaaagaggagtcaaagagataagattaaagatgtgaagattaagatcttggtggcattcagggattggcacttctacaagaaatcactgaagggagtaatgtgacattacttttcacttcaggatggccattctaactccagggggtagactggactaggtaagactggaggcaggtagacctcttctaaggcctgcgatagtgaaagacaaaaataagtggggaaattcaggggatagtgaaaatcagtaggacttaatgagcaagccagaggttcctccacaacaaccagt

SEQ ID NO: 359 - DNA, 620 bp, Homo sapien
acagcattccaaaatatacatctagagactaarrgtaaatgctctatagtgaagaagtaataattaaaaaatgctactaatatagaaaatttataatcagaaaaataaatattcagggagctcaccagaagaataaagtgctctgccagttattaaaggattactgctggtgaattaaatatggcattccccaagggaaatagagagattcttctggattatgttcaatatttatttcacaggattaactgttttaggaacagatataaagcttcgccacggaagagatggacaaagcacaaagacaacatgataccttaggaagcaacactaccctttcaggcataaaatttggagaaatgcaacattatgcttcatgaataatatgtagaaagaaggtctgatgaaaatgacatccttaatgtaagataactttataagaattctgggtcaaataaaattctttgaagaaaacatccaaatgtcattgacttatcaaatactatcttggcatataacctatgaaggcaaaactaaacaaacaaaaagctcacaccaaacaaaaccatcaacttattttgtattctataacatacgagactgtaaagatgtgacagtgt

SEQ ID NO: 360 - DNA, 431 bp, Homo sapien
aaaaaaaaaaagccagaacaacatgtgatagataatatgattggctgcacacttccagactgatgaatgatgaacgtgatggactattgtatggagcacatcttcagcaagagggggaaatactcatcatttttggccagcagttgtttgatcaccaaacatcatgccagaatactcagcaaaccttcttagctcttgagaagtcaaagtccgggggaatttattcctggcaattttaattggactccttatgtgagagcagcggctacccagctggggtggtggagcgaacccgtcactagtggacatgcagtggcagagctcctggtaaccacctagaggaatacacaggcacatgtgtgatgccaagcgtgacacctgtagcactcaaatttgtcttgtttttgtctttcggtgtgtagattcttagt

SEQ ID NO: 361 - DNA, 351 bp, Homo sapien
acactgatttccgatcaaaagaatcatcatctttaccttgacttttcagggaattactgaactttcttctcagaagatagggcacagccattgccttggcctcacttgaagggtctgcatttgggtcctctggtctcttgccaagtttcccagccactcgagggagaaatatcgggaggtttgacttcctccggggctttcccgagggcttcaccgtgagccctgcggccctcagggctgcaatcctggattcaatgtctgaaacctcgctctctgcctgctggacttctgaggccgtcactgccactctgtcctccagctctgacagctcctcatctgtggtcctgttgt

SEQ ID NO: 362 - DNA, 463 bp, Homo sapien
acttcatcaggccataatgggtgcctcccgtgagaatccaagcacctttggactgcgcgatgtagatgagccggctgaagatcttgcgcatgcgcggcttcagggcgaagttcttggcgcccccggtcacagaaatgaccaggttgggtgttttcaggtgccagtgctgggtcagcagctcgtaaaggatttccgcgtccgtgtcgcaggacagacgtatatacttccctttcttccccagtgtctcaaactgaatatccccaaaggcgtcggtaggaaattccttggtgtgtttcttgtagttccatttctcactttggttgatctgggtgccttccatgtgctggctctgggcatagccacacttgcacacattctccctgataagcacgatggtgtggacaggaaggaaggatttcattgagcctgcttatggaaactggtattgttagcttaaatagac

SEQ ID NO: 363 - DNA, 653 bp, Homo sapien
  misc_feature (1)...(653): n = A,T,C or G
acccccgagtncctgnctggcatactgngaacgaccaacgacacacccaagctcggcctcctcttggngattctgggtgacatcttcatgaatggcaaccgtgccagwgaggctgtcctctgggaggcactacgcaagatgggactgcgtcctggggtgagacatcctctccttggagatctaacgaaacttctcacctatgagttgtaaagcagaaatacctgnactacagacgagtgcccaacagcaaccccccggaagtatgagttcctctrgggcctccgttcctaccatgagasctagcaagatgnaagtgttgagantcattgcagaggttcagaaaagagacccntcgtgactggtctgcacagttcatggaggctgcagatgaggccttggatgctctggatgctgctgcagctgaggccgaagcccgggctgaagcaagaacccgcatgggaattggagatgaggctgtgtntgggccctggagctgggatgacattgagtttgagctgctgacctgggatgaggaaggagattttggagatccntggtccagaattccatttaccttctgggccagataccaccagaatgcccgctccagattccctcagacctttgccggtcccattattggtcstggtggt

SEQ ID NO: 364 - DNA, 401 bp, Homo sapien
actagaggaaagacgttaaaccactctactaccacttgtggaactctcaaagggtaaatgacaaagccaatgaatgactctaaaaacaatatttacatttaatggtttgtagacaataaaaaaacaaggtggatagatctagaattgtaacattttaagaaaaccatagcatttgacagatgagaaagctcaattatagatgcaaagttataactaaactactatagtagtaaagaaatacatttcacacccttcatataaattcactatcttggcttgaggcactccataaaatgtatcacgtgcatagtaaatctttatatttgctatggcgttgcactagaggacttggactgcaacaagtggatgcgcggaaaatgaaatcttcttcaatagcccag

SEQ ID NO: 365 - DNA, 356 bp, Homo sapien
ccagtgtcatatttgggcttaaaatttcaagaagggcacttcaaatggctttgcatttgcatgtttcagtgctagagcgtaggaatagaccctggcgtccactgtgagatgttcttcagctaccagagcatcaagtctctgcagcaggtcattcttgggtaaagaaatgacttccacaaactctccatcccctggctttggcttcggccttgcgttttcggcatcatctccgttaatggtgactgtcacgatgtgtatagtacagtttgacaagcctgggtccatacagaccgctggagaacattcggcaatgtcccctttgtagccagtttcttcttcgagctcccggagagcag

SEQ ID NO: 366 - DNA, 1851 bp, Homo sapien
tcatcaccattgccagcagcggcaccgttagtcaggttttctgggaatcccacatgagtacttccgtgttcttcattcttcttcaatagccataaatcttctagctctggctggctgttttcacttcctttaagcctttgtgactcttcctctgatgtcagctttaagtcttgttctggattgctgttttcagaagagatttttaacatctgtttttctttgtagtcagaaagtaactggcaaattacatgatgatgactagaaacagcatactctctggccgtctttccagatcttgagaagatacatcaacattttgctcaagtagagggctgactatacttgctgatccacaacatacagcaagtatgagagcagttcttccatatctatccagcgcatttaaattcgcttttttcttgattaaaaatttcaccacttgctgtttttgctcatgtataccaagtagcagtggtgtgaggccatgcttgttttttgattcgatatcagcaccgtataagagcagtgctttggccattaatttatcttcattgtagacagcatagtgtagagtggtatttccatactcatctggaatatttggatcagtgccatgttccagcaacattaacgcacattcatcttcctggcattgtacggcctttgtcagagctgtcctctttttgttgtcaaggacattaagttgacatcgtctgtccagcacgagttttactacttctgaattcccattggcagaggccagatgtagagcagtcctcttttgcttgtccctcttgttcacatccgtgtccctgagcatgacgatgagatcctttctggggactttaccccaccaggcagctctgtggagcttgtccagatcttctccatggacgtggtacctgggatccatgaaggcgctgtcatcgtagtctccccaagcgaccacgttgctcttgccgctcccctgcagcaggggaagcagtggcagcaccacttgcacctcttgctcccaagcgtcttcacagaggagtcgttgtggtctccagaagtgcccacgttgctcttgccgctccccctgtccatccagggaggaagaaatgcaggaaatgaaagatgcatgcacgatggtatactcctcagccatcaaacttctggacagcaggtcacttccagcaaggtggagaaagctgtccacccacagaggatgagatccagaaaccacaatatccattcacaaacaaacacttttcagccagacacaggtactgaaatcatgtcatctgcggcaacatggtggaacctacccaatcacacatcaagagatgaagacactgcagtatatctgcacaacgtaatactcttcatccataacaaaataatataattttcctctggagccatatggatgaactatgaaggaagaactccccgaagaagccagtcgcagagaagccacactgaagctctgtcctcagccatcagcgccacggacaggartgtgtttcttccccagtgatgcagcctcaagttatcccgaagctgccgcagcacacggtggctcctgagaaacaccccagctcttccggtctaacacaggcaagtcaataaatgtgataatcacataaacagaattaaaagcaaagtcacataagcatctcaacagacacagaaaaggcatttgacaaaatccagcatccttgtatttattgttgcagttctcagaggaaatgcttctaacttttccccatttagtattatgttggctgtgggcttgtcataggtggtttttattactttaaggtatgtcccttctatgcctgttttgctgagggttttaattctcgtgcc

SEQ ID NO: 367 - DNA, 668 bp, Homo sapien
cttgagcttccaaatayggaagactggcccttacacasgtcaatgttaaaatgaatgcatttcagtattttgaagataaaattrgtagatctataccttgttttttgattcgatatcagcaccrtataagagcagtgctttggccattaatttatctttcattrtagacagcrtagtgyagagtggtatttccatactcatctggaatatttggatcagtgccatgttccagcaacattaacgcacattcatcttcctggcattgtacggcctgtcagtattagacccaaaaacaaattacatatcttaggaattcaaaataacattccacagctttcaccaactagttatatttaaaggagaaaactcatttttatgccatgtattgaaatcaaacccacctcatgctgatatagttggctactgcatacctttatcagagctgtcctctttttgttgtcaaggacattaagttgacatcgtctgtccagcaggagttttactacttctgaattcccattggcagaggccagatgtagagcagtcctatgagagtgagaagactttttaggaaattgtagtgcactagctacagccatagcaatgattcatgtaactgcaaacactgaatagcctgctattactctgccttcaaaaaaaaaaaaaaa

SEQ ID NO: 368 - DNA, 1512 bp, Homo sapien
gggtcgcccagggggsgcgtgggctttcctcgggtgggtgtgggttttccctgggtggggtgggctgggctrgaatcccctgctggggttggcaggttttggctgggattgacttttytcttcaaacagattggaaacccggagttacctgctagttggtgaaactggttggtagacgcgatctgttggctactactggcttctcctggctgttaaaagcagatggtggttgaggttgattccatgccggctgcttcttctgtgaagaagccatttggtctcaggagcaagatgggcaagtggtgctgccgttgcttcccctgctgcagggagagcggcaagagcaacgtgggcacttctggagaccacgacgactctgctatgaagacactcaggagcaagatgggcaagtggtgccgccactgcttcccctgctgcagggggagtggcaagagcaacgtgggcgcttctggagaccacgacgaytctgctatgaagacactcaggaacaagatgggcaagtggtgctgccactgcttcccctgctgcagggggagcrgcaagagcaaggtgggcgcttggggagactacgatgacagtgccttcatggagcccaggtaccacgtccgtggagaagatctggacaagctccacagagctgcctggtggggtaaagtccccagaaaggatctcatcgtcatgctcagggacactgacgtgaacaagaaggacaagcaaaagaggactgctctacatctggcctctgccaatgggaattcagaagtagtaaaactcstgctggacagacgatgtcaacttaatgtccttgacaacaaaaagaggacagctctgayaaaggccgtacaatgccaggaagatgaatgtgcgttaatgttgctggaacatggcactgatccaaatattccagatgagtatggaaataccactctrcactaygctrtctayaatgaagataaattaatggccaaagcactgctcttatayggtgctgatatcgaatcaaaaaacaaggtatagatctactaattttatcttcaaaatactgaaatgcattcattttaacattgacgtgtgtaagggccagtcttccgtatttggaagctcaagcataacttgaatgaaaatattttgaaatgacctaattatctmagactttattttaaatattgttattttcaaagaagcattagagggtacagttttttttttttaaatgcacttctggtaaatacttttgttgaaaacactgaatttgtaaaaggtaatacttactatttttcaatttttccctcctaggatttttttcccctaatgaatgtaagatggcaaaatttgccctgaaataggttttacatgaaaactccaagaaaagttaaacatgtttcagtgaatagagatcctgctcctttggcaagttcctaaaaaacagtaatagatacgaggtgatgcgcctgtcagtggcaaggtttaagatatttctgatctcgtgcc

SEQ ID NO: 369 - DNA, 1853 bp, Homo sapien
gggtcgcccagggggsgcgtgggctttcctcgggtgggtgtgggttttccctgggtggggtgggctgggctrgaatcccctgctggggttggcaggttttggctgggattgacttttytcttcaaacagattggaaacccggagttacctgctagttggtgaaactggttggtagacgcgatctgttggctactactggcttctcctggctgttaaaagcagatggtggttgaggttgattccatgccggctgcttcttctgtgaagaagccatttggtctcaggagcaagatgggcaagtggtgctgccgttgcttcccctgctgcagggagagcggcaagagcaacgtgggcacttctggagaccacgacgactctgctatgaagacactcaggagcaagatgggcaagtggtgccgccactgcttcccctgctgcagggggagtggcaagagcaacgtgggcgcttctggagaccacgacgaytctgctatgaagacactcaggaacaagatgggcaagtggtgctgccactgcttcccctgctgcagggggagcrgcaagagcaaggtgggcgcttggggagactacgatgacagygccttcatggakcccaggtaccacgtccrtggagaagatctggacaagctccacagagctgcctggtggggtaaagtccccagaaaggatctcatcgtcatgctcagggacackgaygtgaacaagarggacaagcaaaagaggactgctctacatctggcctctgccaatgggaattcagaagtagtaaaactcstgctggacagacgatgtcaacttaatgtccttgacaacaaaaagaggacagctctgayaaaggccgtacaatgccaggaagatgaatgtgcgttaatgttgctggaacatggcactgatccaaatattccagatgagtatggaaataccactctrcactaygctrtctayaatgaagataaattaatggccaaagcactgctcttatayggtgctgatatcgaatcaaaaaacaagcatggcctcacaccactgytacttggtrtacatgagcaaaaacagcaagtsgtgaaatttttaatyaagaaaaaagcgaatttaaaatgcrctggatagatatggaagractgctctcatacttgctgtatgttgtggatcagcaagtatagtcagccytctacttgagcaaaatrttgatgtatcttctcaagatctggaaagacggccagagagtatgctgtttctagtcatcatcatgtaatttgccagttactttctgactacaaagaaaaacagatgttaaaaatctcttctgaaaacagcaatccagaacaagacttaaagctgacatcagaggaagagtcacaaaggcttaaaggaagtgaaaacagccagccagaggcatggaaacttttaaatttaaacttttggtttaatgttttttttttttgccttaataatattagatagtcccaaatgaaatwacctatgagactaggctttgagaatcaatagattctttttttaagaatcttttggctaggagcggtgtctcacgcctgtaattccagcaccttgagaggctgaggtgggcagatcacgagatcaggagatcgagaccatcctggctaacacggtgaaaccccatctctactaaaaatacaaaaacttagctgggtgtggtggcgggtgcctgtagtcccagctactcaggargctgaggcaggagaatggcatgaacccgggaggtggaggttgcagtgagccgagatccgccactacactccagcctgggtgacagagcaagactctgtctcaaaaaaaaaaaaaaaaaaaaa

SEQ ID NO: 370 - DNA, 2184 bp, Homo sapien
ggcacgagaattaaaaccctcagcaaaacaggcatagaagggacataccttaaagtaataaaaaccacctatgacaagcccacagccaacataatactaaatggggaaaagttagaagcatttcctctgagaactgcaacaataaatacaaggatgctggattttgtcaaatgccttttctgtgtctgttgagatgcttatgtgactttgcttttaattctgtttatgtgattatcacatttattgacttgcctgtgttagaccggaagagctggggtgtttctcaggagccaccgtgtgctgcggcagcttcgggataacttgaggctgcatcactggggaagaaacacaytcctgtccgtggcgctgatggctgaggacagagcttcagtgtggcttctctgcgactggcttcttcggggagttcttccttcatagttcatccatatggctccagaggaaaattatattattttgttatggatgaagagtattacgttgtgcagatatactgcagtgtcttcatctcttgatgtgtgattgggtaggttccaccatgttgccgcagatgacatgatttcagtacctgtgtctggctgaaaagtgtttgtttgtgaatggatattgtggtttctggatctcatcctctgtgggtggacagctttctccaccttgctggaagtgacctgctgtccagaagtttgatggctgaggagtataccatcgtgcatgcatctttcatttcctgcatttcttcctccctggatggacagggggagcggcaagagcaacgtgggcacttctggagaccacaacgactcctctgtgaagacgcttgggagcaagaggtgcaagtggtgctgccactgcttcccctgctgcaggggagcggcaagagcaacgtggtcgcttggggagactacgatgacagcgccttcatggatcccaggtaccacgtccatggagaagatctggacaagctccacagagctgcctggtggggtaaagtccccagaaaggatctcatcgtcatgctcagggacacggatgtgaacaagagggacaagcaaaagaggactgctctacatctggcctctgccaatgggaattcagaagtagtaaaactcgtgctggacagacgatgtcaacttaatgtccttgacaacaaaaagaggacagctctgacaaaggccgtacaatgccaggaagatgaatgtgcgttaatgttgctggaacatggcactgatccaaatattccagatgagtatggaaataccactctacactatgctgtctacaatgaagataaattaatggccaaagcactgctcttatacggtgctgatatcgaatcaaaaaacaagcatggcctcacaccactgctacttggtatacatgagcaaaaacagcaagtggtgaaatttttaatcaagaaaaaagcgaatttaaatgcgctggatagatatggaagaactgctctcatacttgctgtatgttgtggatcagcaagtatagtcagccctctacttgagcaaaatgttgatgtatcttctcaagatctggaaagacggccagagagtatgctgtttctagtcatcatcatgtaatttgccagttactttctgactacaaagaaaaacagatgttaaaaatctcttctgaaaacagcaatccagaacaagacttaaagctgacatcagaggaagagtcacaaaggcttaaaggaagtgaaaacagccagccagaggcatggaaacttttaaatttaaacttttggtttaatgttttttttttttgccttaataatattagatagtcccaaatgaaatwacctatgagactaggctttgagaatcaatagattctttttttaagaatcttttggctaggagcggtgtctcacgcctgtaattccagcaccttgagaggctgaggtgggcagatcacgagatcaggagatcgagaccatcctggctaacacggtgaaaccccatctctactaaaaatacaaaaacttagctgggtgtggtggcgggtgcctgtagtcccagctactcaggargctgaggcaggagaatggcatgaacccgggaggtggaggttgcagtgagccgagatccgccactacactccagcctgggtgacagagcaagactctgtctcaaaaaaaaaaaaaaaaaaaaa

SEQ ID NO: 371 - DNA, 1855 bp, Homo sapien
  misc_feature (1)...(1855): n = A,T,C or G
tgcacgcatcggccagtgtctgtgccacgtacactgacgccccctgagatgtgcacgccgcacgcgcacgttgcacgcgcggcagcggcttggctggcttgtaacggcttgcacgcgcacgccgcccccgcataaccgtcagactggcctgtaacggcttgcaggcgcacgccgcacgcgcgtaacggcttggctgccctgtaacggcttgcacgtgcatgctgcacgcgcgttaacggcttggctggcatgtagccgcttggcttggctttgcattytttgctkggctkggcgttgktytcttggattgacgcttcctccttggatkgacgtttcctccttggatkgacgtttcytytytcgcgttcctttgctggacttgaccttttytctgctgggtttggcattcctttggggtgggctgggtgttttctccgggggggktkgcccttcctggggtgggcgtgggkcgcccccagggggcgtgggctttccccgggtgggtgtgggttttcctggggtggggtgggctgtgctgggatccccctgctggggttggcagggattgacttttttcttcaaacagattggaaacccggagtaacntgctagttggtgaaactggttggtagacgcgatctgctggtactactgtttctcctggctgttaaaagcagatggtggctgaggttgattcaatgccggctgcttcttctgtgaagaagccatttggtctcaggagcaagatgggcaagtggtgcgccactgcttcccctgctgcagggggagcggcaagagcaacgtgggcacttctggagaccacaacgactcctctgtgaagacgcttgggagcaagaggtgcaagtggtgctgcccactgcttcccctgctgcaggggagcggcaagagcaacgtggkcgcttggggagactacgatgacagcgccttcatggakcccaggtaccacgtccrtggagaagatctggacaagctccacagagctgcctggtggggtaaagtccccagaaaggatctcatcgtcatgctcagggacactgaygtgaacaagarggacaagcaaaagaggactgctctacatctggcctctgccaatgggaattcagaagtagtaaaactcgtgctggacagacgatgtcaacttaatgtccttgacaacaaaaagaggacagctctgacaaaggccgtacaatgccaggaagatgaatgtgcgttaatgttgctggaacatggcactgatccaaatattccagatgagtatggaaataccactctacactatgctgtctacaatgaagataaattaatggccaaagcactgctcttatacggtgctgatatcgaatcaaaaaacaaggtatagatctactaattttatcttcaaaatactgaaatgcattcattttaacattgacgtgtgtaagggccagtcttccgtatttggaagctcaagcataacttgaatgaaaatattttgaaatgacctaattatctaagactttattttaaatattgttattttcaaagaagcattagagggtacagttttttttttttaaatgcacttctggtaaatacttttgttgaaaacactgaatttgtaaaaggtaatacttactatttttcaatttttccctcctaggatttttttcccctaatgaatgtaagatggcaaaatttgccctgaaataggttttacatgaaaactccaagaaaagttaaacatgtttcagtgaatagagatcctgctcctttggcaagttcctaaaaaacagtaatagatacgaggtgatgcgcctgtcagtggcaaggtttaagatatttctgatctcgtgcc

SEQ ID NO: 372 - DNA, 1059 bp, Homo sapien
gcaacgtgggcacttctggagaccacaacgactcctctgtgaagacgcttgggagcaagaggtgcaagtggtgctgcccactgcttcccctgctgcaggggagcggcaagagcaacgtgggcgcttgrggagactmcgatgacagygccttcatggagcccaggtaccacgtccgtggagaagatctggacaagctccacagagctgccctggtggggtaaagtccccagaaaggatctcatcgtcatgctcagggacactgaygtgaacaagarggacaagcaaaagaggactgctctacatctggcctctgccaatgggaattcagaagtagtaaaactcstgctggacagacgatgtcaacttaatgtccttgacaacaaaaagaggacagctctgayaaaggccgtacaatgccaggaagatgaatgtgcgttaatgttgctggaacatggcactgatccaaatattccagatgagtatggaaataccactctrcactaygctrtctayaatgaagataaattaatggccaaagcactgctcttatayggtgctgatatcgaatcaaaaaacaaggtatagatctactaattttatcttcaaaatactgaaatgcattcattttaacattgacgtgtgtaagggccagtcttccgtatttggaagctcaagcataacttgaatgaaaatattttgaaatgacctaattatctaagactttattttaaatattgttattttcaaagaagcattagagggtacagttttttttttttaaatgcacttctggtaaatacttttgttgaaaacactgaatttgtaaaaggtaatacttactatttttcaatttttccctcctaggatttttttcccctaatgaatgtaagatggcaaaatttgccctgaaataggttttacatgaaaactccaagaaaagttaaacatgtttcagtgaatagagatcctgctcctttggcaagttcctaaaaaacagtaatagatacgaggtgatgcgcctgtcagtggcaaggtttaagatatttctgatctcgtgcc

SEQ ID NO: 373 - DNA, 1155 bp, Homo sapien
atggtggttgaggttgattccatgccggctgcctcttctgtgaagaagccatttggtctcaggagcaagatgggcaagtggtgctgccgttgcttcccctgctgcagggagagcggcaagagcaacgtgggcacttctggagaccacgacgactctgctatgaagacactcaggagcaagatgggcaagtggtgccgccactgcttcccctgctgcagggggagtggcaagagcaacgtgggcgcttctggagaccacgacgactctgctatgaagacactcaggaacaagatgggcaagtggtgctgccactgcttcccctgctgcagggggagcggcaagagcaaggtgggcgcttggggagactacgatgacagtgccttcatggagcccaggtaccacgtccgtggagaagatctggacaagctccacagagctgcctggtggggtaaagtccccagaaaggatctcatcgtcatgctcagggacactgacgtgaacaagaaggacaagcaaaagaggactgctctacatctggcctctgccaatgggaattcagaagtagtaaaactcctgctggacagacgatgtcaacttaatgtccttgacaacaaaaagaggacagctctgataaaggccgtacaatgccaggaagatgaatgtgcgttaatgttgctggaacatggcactgatccaaatattccagatgagtatggaaataccactctgcactacgctatctataatgaagataaattaatggccaaagcactgctcttatatggtgctgatatcgaatcaaaaaacaagcatggcctcacaccactgttacttggtgtacatgagcaaaaacagcaagtcgtgaaatttttaatcaagaaaaaagcgaatttaaatgcactggatagatatggaaggactgctctcatacttgctgtatgttgtggatcagcaagtatagtcagccttctacttgagcaaaatattgatgtatcttctcaagatctatctggacagacggccagagagtatgctgtttctagtcatcatcatgtaatttgccagttactttctgactacaaagaaaaacagatgctaaaaatctcttctgaaaacagcaatccagaaaatgtctcaagaaccagaaataaataa

SEQ ID NO: 374 - DNA, 2000 bp, Homo sapien
atggtggttgaggttgattccatgccggctgcctcttctgtgaagaagccatttggtctcaggagcaagatgggcaagtggtgctgccgttgcttcccctgctgcagggagagcggcaagagcaacgtgggcacttctggagaccacgacgactctgctatgaagacactcaggagcaagatgggcaagtggtgccgccactgcttcccctgctgcagggggagtggcaagagcaacgtgggcgcttctggagaccacgacgactctgctatgaagacactcaggaacaagatgggcaagtggtgctgccactgcttcccctgctgcagggggagcggcaagagcaaggtgggcgcttggggagactacgatgacagtgccttcatggagcccaggtaccacgtccgtggagaagatctggacaagctccacagagctgcctggtggggtaaagtccccagaaaggatctcatcgtcatgctcagggacactgacgtgaacaagaaggacaagcaaaagaggactgctctacatctggcctctgccaatgggaattcagaagtagtaaaactcctgctggacagacgatgtcaacttaatgtccttgacaacaaaaagaggacagctctgataaaggccgtacaatgccaggaagatgaatgtgcgttaatgttgctggaacatggcactgatccaaatattccagatgagtatggaaataccactctgcactacgctatctataatgaagataaattaatggccaaagcactgctcttatatggtgctgatatcgaatcaaaaaacaagcatggcctcacaccactgttacttggtgtacatgagcaaaaacagcaagtcgtgaaatttttaatcaagaaaaaagcgaatttaaatgcactggatagatatggaaggactgctctcatacttgctgtatgttgtggatcagcaagtatagtcagccttctacttgagcaaaatattgatgtatcttctcaagatctatctggacagacggccagagagtatgctgtttctagtcatcatcatgtaatttgccagttactttctgactacaaagaaaaacagatgctaaaaatctcttctgaaaacagcaatccagaacaagacttaaagctgacatcagaggaagagtcacaaaggttcaaaggcagtgaaaatagccagccagagaaaatgtctcaagaaccagaaataaataaggatggtgatagagaggttgaagaagaaatgaagaagcatgaaagtaataatgtgggattactagaaaacctgactaatggtgtcactgctggcaatggtgataatggattaattcctcaaaggaagagcagaacacctgaaaatcagcaatttcctgacaacgaaagtgaagagtatcacagaatttgcgaattagtttctgactacaaagaaaaacagatgccaaaatactcttctgaaaacagcaacccagaacaagacttaaagctgacatcagaggaagagtcacaaaggcttgagggcagtgaaaatggccagccagagctagaaaattttatggctatcgaagaaatgaagaagcacggaagtactcatgtcggattcccagaaaacctgactaatggtgccactgctggcaatggtgatgatggattaattcctccaaggaagagcagaacacctgaaagccagcaatttcctgacactgagaatgaagagtatcacagtgacgaacaaaatgatactcagaagcaattttgtgaagaacagaacactggaatattacacgatgagattctgattcatgaagaaaagcagatagaagtggttgaaaaaatgaattctgagctttctcttagttgtaagaaagaaaaagacatcttgcatgaaaatagtacgttgcgggaagaaattgccatgctaagactggagctagacacaatgaaacatcagagccagctaaaaaaaaaaaaaaaaaaaaaaaaaaaaaaaaa

SEQ ID NO: 375 - DNA, 2040 bp, Homo sapien
atggtggttgaggttgattccatgccggctgcctcttctgtgaagaagccatttggtctcaggagcaagatgggcaagtggtgctgccgttgcttcccctgctgcagggagagcggcaagagcaacgtgggcacttctggagaccacgacgactctgctatgaagacactcaggagcaagatgggcaagtggtgccgccactgcttcccctgctgcagggggagtggcaagagcaacgtgggcgcttctggagaccacgacgactctgctatgaagacactcaggaacaagatgggcaagtggtgctgccactgcttcccctgctgcagggggagcggcaagagcaaggtgggcgcttggggagactacgatgacagtgccttcatggagcccaggtaccacgtccgtggagaagatctggacaagctccacagagctgcctggtggggtaaagtccccagaaaggatctcatcgtcatgctcagggacactgacgtgaacaagaaggacaagcaaaagaggactgctctacatctggcctctgccaatgggaattcagaagtagtaaaactcctgctggacagacgatgtcaacttaatgtccttgacaacaaaaagaggacagctctgataaaggccgtacaatgccaggaagatgaatgtgcgttaatgttgctggaacatggcactgatccaaatattccagatgagtatggaaataccactctgcactacgctatctataatgaagataaattaatggccaaagcactgctcttatatggtgctgatatcgaatcaaaaaacaagcatggcctcacaccactgttacttggtgtacatgagcaaaaacagcaagtcgtgaaatttttaatcaagaaaaaagcgaatttaaatgcactggatagatatggaaggactgctctcatacttgctgtatgttgtggatcagcaagtatagtcagccttctacttgagcaaaatattgatgtatcttctcaagatctatctggacagacggccagagagtatgctgtttctagtcatcatcatgtaatttgccagttactttctgactacaaagaaaaacagatgctaaaaatctcttctgaaaacagcaatccagaacaagacttaaagctgacatcagaggaagagtcacaaaggttcaaaggcagtgaaaatagccagccagagaaaatgtctcaagaaccagaaataaataaggatggtgatagagaggttgaagaagaaatgaagaagcatgaaagtaataatgtgggattactagaaaacctgactaatggtgtcactgctggcaatggtgataatggattaattcctcaaaggaagagcagaacacctgaaaatcagcaatttcctgacaacgaaagtgaagagtatcacagaatttgcgaattagtttctgactacaaagaaaaacagatgccaaaatactcttctgaaaacagcaacccagaacaagacttaaagctgacatcagaggaagagtcacaaaggcttgagggcagtgaaaatggccagccagagaaaagatctcaagaaccagaaataaataaggatggtgatagagagctagaaaattttatggctatcgaagaaatgaagaagcacggaagtactcatgtcggattcccagaaaacctgactaatggtgccactgctggcaatggtgatgatggattaattcctccaaggaagagcagaacacctgaaagccagcaatttcctgacactgagaatgaagagtatcacagtgacgaacaaaatgatactcagaagcaattttgtgaagaacagaacactggaatattacacgatgagattctgattcatgaagaaaagcagatagaagtggttgaaaaaatgaattctgagctttctcttagttgtaagaaagaaaaagacatcttgcatgaaaatagtacgttgcgggaagaaattgccatgctaagactggagctagacacaatgaaacatcagagccagctaaaaaaaaaaaaaaaaaaaaaaaaaaaa

SEQ ID NO: 376 - protein, 329 aa, Homo sapien
MDIVVSGSHPLWVDSFLHLAGSDLLSRSLMAEEYTIVHASFISCISSSLDGQGERQEQRGHFWRPQRLLCEDAWEQEVQVVLPLLPLLQGSGKSNVVAWGDYDDSAFMDPRYHVHGEDLDKLHRAAWWGKVPRKDLIVMLRDTDVNKRDKQKRTALHLASANGNSEVVKLVLDRRCQLNVLDNKKRTALTKAVQCQEDECALMLLEHGTDPNIPDEYGNTTLHYAVYNEDKLMAKALLLYGADIESKNKHGLTPLLLGIHEQKQQVVKFLIKKKANLNALDRYGRTALILAVCCGSASIVSPLLEQNVDVSSQDLERRPESMLFLVIIM

SEQ ID NO: 377 - protein, 148 aa, Homo sapien
  VARIANT (1)...(148): Xaa = Any Amino Acid
MTXPSWSPGTTSVEKIWTSSTELPWWGKVPRKDLIVMLRDTDVNKXDKQKRTALHLASANGNSEVVKLXLDRRCQLNVLDNKKRTALXKAVQCQEDECALMLLEHGTDPNIPDEYGNTTLHYAXYNEDKLMAKALLLYGADIESKNKV

SEQ ID NO: 378 - protein, 1719 aa, Homo sapien [sequence omitted]

SEQ ID NO: 379 - protein, 656 aa, Homo sapien
MVVEVDSMPAASSVKKPFGLRSKMGKWCCRCFPCCRESGKSNVGTSGDHDDSAMKTLRSKMGKWCRHCFPCCRGSGKSNVGASGDHDDSAMKTLRNKMGKWCCHCFPCCRGSGKSKVGAWGDYDDSAFMEPRYHVRGEDLDKLHRAAWWGKVPRKDLIVMLRDTDVNKKDKQKRTALHLASANGNSEVVKLLLDRRCQLNVLDNKKRTALIKAVQCQEDECALMLLEHGTDPNIPDEYGNTTLHYAIYNEDKLMAKALLLYGADIESKNKHGLTPLLLGVHEQKQQVVKFLIKKKANLNALDRYGRTALILAVCCGSASIVSLLLEQNIDVSSQDLSGQTAREYAVSSHHHVICQLLSDYKEKQMLKISSENSNPEQDLKLTSEEESQRFKGSENSQPEKMSQEPEINKDGDREVEEEMKKHESNNVGLLENLTNGVTAGNGDNGLIPQRKSRTPENQQFPDNESEEYHRICELVSDYKEKQMPKYSSENSNPEQDLKLTSEEESQRLEGSENGQPELENFMAIEEMKKHGSTHVGFPENLTNGATAGNGDDGLIPPRKSRTPESQQFPDTENEEYHSDEQNDTQKQFCEEQNTGILHDEILIHEEKQIEVVEKMNSELSLSCKKEKDILHENSTLREEIAMLRLELDTMKHQSQL

SEQ ID NO: 380 - protein, 671 aa, Homo sapien
MVVEVDSMPAASSVKKPFGLRSKMGKWCCRCFPCCRESGKSNVGTSGDHDDSAMKTLRSKMGKWCRHCFPCCRGSGKSNVGASGDHDDSAMKTLRNKMGKWCCHCFPCCRGSGKSKVGAWGDYDDSAFMEPRYHVRGEDLDKLHRAAWWGKVPRKDLIVMLRDTDVNKKDKQKRTALHLASANGNSEVVKLLLDRRCQLNVLDNKKRTALIKAVQCQEDECALMLLEHGTDPNIPDEYGNTTLHYAIYNEDKLMAKALLLYGADIESKNKHGLTPLLLGVHEQKQQVVKFLIKKKANLNALDRYGRTALILAVCCGSASIVSLLLEQNIDVSSQDLSGQTAREYAVSSHHHVICQLLSDYKEKQMLKISSENSNPEQDLKLTSEEESQRFKGSENSQPEKMSQEPEINKDGDREVEEEMKKHESNNVGLLENLTNGVTAGNGDNGLIPQRKSRTPENQQFPDNESEEYHRICELVSDYKEKQMPKYSSENSNPEQDLKLTSEEESQRLEGSENGQPEKRSQEPEINKDGDRELENFMAIEEMKKHGSTHVGFPENLTNGATAGNGDDGLIPPRKSRTPESQQFPDTENEEYHSDEQNDTQKQFCEEQNTGILHDEILIHEEKQIEVVEKMNSELSLSCKKEKDILHENSTLREEIAMLRLELDTMKHQSQL

SEQ ID NO: 381 - DNA, 251 bp, Homo sapien
ggagaagcgtctgctggggcaggaaggggtttccctgccctctcacctgtccctcaccaaggtaacatgcttcccctaagggtatcccaacccaggggcctcaccatgacctctgaggggccaatatcccaggagaagcattggggagttgggggcaggtgaaggacccaggactcacacatcctgggcctccaaggcagaggagagggtcctcaagaaggtcaggaggaaaatccgtaacaagcagtcag

SEQ ID NO: 382 - DNA, 3279 bp, Homo sapiens
cttcctgcagcccccatgctggtgaggggcacgggcaggaacagtggacccaacatggaaatgctggagggtgtcaggaagtgatcgggctctggggcagggaggaggggtggggagtgtcactgggaggggacatcctgcagaaggtaggagtgagcaaacacccgctgcaggggaggggagagccctgcggcacctgggggagcagagggagcagcacctgcccaggcctgggaggaggggcctggagggcgtgaggaggagcgagggggctgcatggctggagtgagggatcaggggcagggcgcgagatggcctcacacagggaagagagggcccctcctgcagggcctcacctgggccacaggaggacactgcttttcctctgaggagtcaggagctgtggatggtgctggacagaagaaggacagggcctggctcaggtgtccagaggctgtcgctggcttccctttgggatcagactgcagggagggagggcggcagggttgtggggggagtgacgatgaggatgacctgggggtggctccaggccttgcccctgcctgggccctcacccagcctccctcacagtctcctggccctcagtctctcccctccactccatcctccatctggcctcagtgggtcattctgatcactgaactgaccatacccagccctgcccacggccctccatggctccccaatgccctggagaggggacatctagtcagagagtagtcctgaagaggtggcctctgcgatgtgcctgtgggggcagcatcctgcagatggtcccggccctcatcctgctgacctgtctgcagggactgtcctcctggaccttgccccttgtgcaggagctggaccctgaagtcccctccccataggccaagactggagccttgttccctctgttggactccctgcccatattcttgtgggagtgggttctggagacatttctgtctgttcctgagagctgggaattgctctcagtcatctgcctgcgcggttctgagagatggagttgcctaggcagttattggggccaatctttctcactgtgtctctcctcctttacccttagggtgattctgggggtccacttgtctgtaatggtgtgcttcaaggtatcacatcatggggccctgagccatgtgccctgcctgaaaagcctgctgtgtacaccaaggtggtgcattaccggaagtggatcaaggacaccatcgcagccaacccctgagtgcccctgtcccacccctacctctagtaaatttaagtccacctcacgttctggcatcacttggcctttctggatgctggacacctgaagcttggaactcacctggccgaagctcgagcctcctgagtcctactgacctgtgctttctggtgtggagtccagggctgctaggaaaaggaatgggcagacacaggtgtatgccaatgtttctgaaatgggtataatttcgtcctctccttcggaacactggctgtctctgaagacttctcgctcagtttcagtgaggacacacacaaagacgtgggtgaccatgttgtttgtggggtgcagagatgggaggggtggggcccaccctggaagagtggacagtgacacaaggtggacactctctacagatcactgaggataagctggagccacaatgcatgaggcacacacacagcaaggttgacgctgtaaacatagcccacgctgtcctgggggcactgggaagcctagataaggccgtgagcagaaagaaggggaggatcctcctatgttgttgaaggagggactagggggagaaactgaaagctgattaattacaggaggtttgttcaggtcccccaaaccaccgtcagatttgatgatttcctagcaggacttacagaaataaagagctatcatgctgtggtttattatggtttgttacattgataggatacatactgaaatcagcaaacaaaacagatgtatagattagagtgtggagaaaacagaggaaaacttgcagttacgaagactggcaacttggctttactaagttttcagactggcaggaagtcaaacctattaggctgaggaccttgtggagtgtagctgatccagctgatagaggaactagccaggtgggggcctttccctttggatggggggcatatccgacagttattctctccaagtggagacttacggacagcatataattctccctgcaaggatgtatgataatatgtacaaagtaattccaactgaggaagctcacctgatccttagtgtccagggtttttactgggggtctgtaggacgagtatggagtacttgaataattgacctgaagtcctcagacctgaggttccctagagttcaaacagatacagcatggtccagagtcccagatgtacaaaaacagggattcatcacaaatcccatctttagcatgaagggtctggcatggcccaaggccccaagtatatcaaggcacttgggcagaacatgccaaggaatcaaatgtcatctcccaggagttattcaagggtgagccctttacttgggatgtacaggctttgagcagtgcagggctgctgagtcaaccttttattgtacaggggatgagggaaagggagaggatgaggaagcccccctggggatttggtttggtcttgtgatcaggtggtctatggggctatccctacaaagaagaatccagaaataggggcacattgaggaatgatactgagcccaaagagcattcaatcattgttttatttgccttcttttcacaccattggtgagggagggattaccaccctggggttatgaagatggttgaacaccccacacatagcaccggagatatgagatcaacagtttcttagccatagagattcacagcccagagcaggaggacgctgcacaccatgcaggatgacatgggggatgcgctcgggattggtgtgaagaagcaaggactgttagaggcaggctttatagtaacaagacggtggggcaaactctgatttccgtgggggaatgtcatggtcttgctttactaagttttgagactggcaggtagtgaaactcattaggctgagaaccttgtggaatgcagctgacccagctgatagaggaagtagccaggtgggagcctttcccagtgggtgtgggacatatctggcaagattttgtggcactcctggttacagatactggggcagcaaataaaactgaatcttgttttcagaccttaaaaaaaaaaaaaaaaaaaaagtttt

SEQ ID NO: 383 - protein, 154 aa, Homo sapiens [sequence omitted]

SEQ ID NO: 384 - DNA, 557 bp, Homo sapiens
ggatcctctagagcggccgcctactactactaaattcgcggccgcgtcgacgaagaagagaaagatgtgttttgttttggactctctgtggtcccttccaatgctgtgggtttccaaccaggggaagggtcccttttgcattgccaagtgccataaccatgagcactactctaccatggttctgcctcctggccaagcaggctggtttgcaagaatgaaatgaatgattctacagctaggacttaaccttgaaatggaaagtcttgcaatcccatttgcaggatccgtctgtgcacatgcctctgtagagagcagcattcccagggaccttggaaacagttggcactgtaaggtgcttgctccccaagacacatcctaaaaggtgttgtaatggtgaaaacgtcttccttctttattgccccttcttatttatgtgaacaactgtttgtctttttttgtatcttttttaaactgtaaagttcaattgtgaaaatgaatatcatgcaaataaattatgcgatttttttttcaaagtaaaaaaaaaaaaaaaaaaaaaa

SEQ ID NO: 385 - DNA, 337 bp, Homo sapiens
ttcccaggtgatgtgcgagggaagacacatttactatccttgatggggctgattcctttagtttctctagcagcagatgggttaggaggaagtgacccaagtggttgactcctatgtgcatctcaaagccatctgctgtcttcgagtacggacacatcatcactcctgcattgttgatcaaaacgtggaggtgcttttcctcagctaagaagcccttagcaaaagctcgaatagacttagtatcagacaggtccagtttccgcaccaacacctgctggttccctgtcgtggtctggatctctttggccaccaattcccccttttccacatcccggca

SEQ ID NO: 386 - DNA, 300 bp, Homo sapiens
gggcccgctaccggcccaggccccgcctcgcgagtcctcctccccgggtgcctgcccgcagcccgctcggcccagagggtgggcgcggggctgcctctaccggctggcggctgtaactcagcgaccttggcccgaaggctctagcaaggacccaccgaccccagccgcggcggcggcggcgcggactttgcccggtgtgtggggcggagcggactgcgtgtccgcggacgggcagcgaagatgttagccttcgctgccaggaccgtggaccgatcccagggctgtggtgtaacctcagcc

SEQ ID NO: 387 - DNA, 537 bp, Homo sapiens
gggccgagtcgggcaccaagggactctttgcaggcttccttcctcggatcatcaaggctgccccctcctgtgccatcatgatcagcacctatgagttcggcaaaagcttcttccagaggctgaaccaggaccggcttctgggcggctgaaaggggcaaggaggcaaggaccccgtctctcccacggatggggagagggcaggaggagacccagccaagtgccttttcctcagcactgagggagggggcttgtttcccttccctcccggcgacaagctccagggcagggctgtccctctgggcggcccagcacttcctcagacacaacttcttcctgctgctccagtcgtggggatcatcacttacccaccccccaagttcaagaccaaatcttccagctgcccccttcgtgtttccctgtgtttgctgtagctgggcatgtctccaggaaccaagaagccctcagcctggtgtagtctccctgacccttgttaattccttaagtctaaagatgatgaacttcaaaaaaaaaaaaaaa

SEQ ID NO: 388 - DNA, 520 bp, Homo sapiens
aggataatttttaaaccaatcaaatgaaaaaaacaaacaaacaaaaaaggaaatgtcatgtgaggttaaaccagtttgcattcccctaatgtggaaaaagtaagaggactactcagcactgtttgaagattgcctcttctacagcttctgagaattgtgttatttcacttgccaagtgaaggaccccctccccaacatgccccagcccacccctaagcatggtcccttgtcaccaggcaaccaggaaactgctacttgtggacctcaccagagaccaggagggtttggttagctcacaggacttcccccaccccagaagattagcatcccatactagactcatactcaactcaactaggctcatactcaattgatggttattagacaattccatttctttctggttattataaacagaaaatctttcctcttctcattaccagtaaaggctcttggtatctttctgttggaatgatttctatgaacttgtcttattttaatggtgggttttttttctggt

SEQ ID NO: 389 - DNA, 365 bp, Homo sapiens
cgttgccccagtttgacagaaggaaaggcggagcttattcaaagtctagagggagtggaggagttaaggctggatttcagatctgcctggttccagccgcagtgtgccctctgctcccccaacgactttccaaataatctcaccagcgccttccagctcaggcgtcctagaagcgtcttgaagcctatggccagctgtctttgtgttccctctcacccgcctgtcctcacagctgagactcccaggaaaccttcagactaccttcctctgccttcagcaaggggcgttgcccacattctctgagggtcagtggaagaacctagactcccattgctagaggtagaaaggggaagggtgctggggag

SEQ ID NO: 390 - DNA, 221 bp, Homo sapiens
  misc_feature (1)...(221): n = A,T,C or G
tgcctctccatcctggccccgacttctctgtcaggaaagtggggatggaccccatctgcatacacggnttctcatgggtgtggaacatctctgcttgcggtttcaggaaggcctctggctgctctangagtctgancngantcgttgccccantntgacanaaggaaaggcggagcttattcaaagtctagagggagtggaggagttaaggctggatttca

SEQ ID NO: 391 - DNA, 325 bp, Homo sapiens
  misc_feature (1)...(325): n = A,T,C or G
tggagcaggtcccgaggcctccctagagcctggggccgactctgtgncgatgcangctttctctcgcgcccagcctggagctgctcctggcatctaccaacaatcagncgaggcgagcagtagccagggcactgctgccaacagccagtccnnataccatcatgtnacccggtgngctctnaanttngatntccanagccctacccatcntagttctgctctcccaccggntaccagccccactgcccaggaatcctacagccagtaccctgtcccgacgtctctacctaccagtacgatgagacctccggctactactatgacc

SEQ ID NO: 392 - DNA, 277 bp, Homo sapiens
  misc_feature (1)...(277): n = A,T,C or G
atattgtttaactccttcctttatatcttttaacattttcatggngaaaggttcacatctagtctcacttnggcnagngnctcctacttgagtctcttccccggcctgnnccagtngnaaantaccangaaccgncatgncttaanaacnncctggtttntgggttnntcaatgactgcatgcagtgcaccaccctgtccactacgtgatgctgtaggattaaagtctcacagtgggcggctgaggatacagcgccgcgtcctgtgttgctggggaa

SEQ ID NO: 393 - DNA, 566 bp, Homo sapiens
actagtccagtgtggtggaattcgcggccgcgtcgacggacaggtcagctgtctggctcagtgatctacattctgaagttgtctgaaaatgtcttcatgattaaattcagcctaaacgttttgccgggaacactgcagagacaatgctgtgagtttccaaccttagcccatctgcgggcagagaaggtctagtttgtccatcagcattatcatgatatcaggactggttacttggttaaggaggggtctaggagatctgtcccttttagagacaccttacttataatgaagtatttgggagggtggttttcaaaagtagaaatgtcctgtattccgatgatcatcctgtaaacattttatcatttattaatcatccctgcctgtgtctattattatattcatatctctacgctggaaactttctgcctcaatgtttactgtgcctttgtttttgctagtttgtgttgttgaaaaaaaaaacattctctgcctgagttttaatttttgtccaaagttattttaatctatacaattaaaagcttttgcctatcaaaaaaaaaaaaaaa

SEQ ID NO: 394 - DNA, 384 bp, Homo sapiens
  misc_feature (1)...(384): n = A,T,C or G
gaacatacatgtcccggcacctgagctgcagtctgacatcatcgccatcacgggcctcgctgcaaattnggaccgggccaaggctggactgctggagcgtgtgaaggagctacaggccnagcaggaggaccgggctttaaggagttttaagctgagtgtcactgtagaccccaaataccatcccaagattatcgggagaaagggggcagtaattacccaaatccggttggagcatgacgtgaacatccagtttcctgataaggacgatgggaaccagccccaggaccaaattaccatcacagggtacgaaaagaacacagaagctgccagggatgctatactgagaattgtgggtgaacttgagcagatggtttctgaggacgt

SEQ ID NO: 395 - DNA, 399 bp, Homo sapiens
ggcaaaactgtgtgacctcaataagacctcgcagatccaaggtcaagtatcagaagtgactctgaccttggactccaagacctacatcaacagcctggctatattagatgatgagccagttatcagaggtttcatcattgcggaaattgtggagtctaaggaaatcatggcctctgaagtattcacgtctttccagtaccctgagttctctatagagttgcctaacacaggcagaattggccagctacttgtctgcaattgtatcttcaagaataccctggccatccctttgactgacgtcaagttctctttggaaagcctgggcatctcctcactacagacctctgaccatgggacggtgcagcctggtgagaccatccaatcccaaataaaatgcac

SEQ ID NO: 396 - DNA, 403 bp, Homo sapiens
  misc_feature (1)...(403): n = A,T,C or G
tggagttntcagtgcaaacaagccataaagcttcagtagcaaattactgtctcacagaaagacattttcaacttctgctccagctgctgataaaacaaatcatgtgtttagcttgactccagacaaggacaacctgttccttcataactctctagagaaaaaaaggagttgttagtagatactaaaaaaagtggatgaataatctggatatttttcctaaaaagattccttgaaacacattaggaaaatggagggccttatgatcagaatgctagaattagtccattgtgctgaagcagggtttaggggagggagtgagggataaaagaaggaaaaaaagaagagtgagaaaacctatttatcaaagcaggtgctatcactcaatgttaggccctgctctttt

SEQ ID NO: 397 - DNA, 100 bp, Homo sapiens
  misc_feature (1)...(100): n = A,T,C or G
actagtncagtgtggtggaattcgcggccgcgtcgacctanaanccatctctatagcaaatccatccccgctcctggttggtnacagaatgactgacaaa

SEQ ID NO: 398 - DNA, 278 bp, Homo sapiens
  misc_feature (1)...(278): n = A,T,C or G
gcggccgcgtcgacagcagttccgccagcgctcgcccctgggtggggatgtgctgcacgcccacctggacatctggaagtcagcggcctggatgaaagagcggacttcacctggggcgattcactactgtgcctcgaccagtgaggagagctggaccgacagcgaggtggactcatcatgctccgggcagcccatccacctgtggcagttcctcaaggagttgctactcaagccccacagctatggccgcttcattangtggctcaacaaggagaagg

SEQ ID NO: 399 - DNA, 298 bp, Homo sapiens
  misc_feature (1)...(298): n = A,T,C or G
acggaggtggaggaagcgnccctgggatcganaggatgggtcctgncattgaccncctcnggggtgccngcatggagcgcatgggcgcgggcctgggccacggcatggatcgcgtgggctccgagatcgagcgcatgggcctggtcatggaccgcatgggctccgtggagcgcatgggctccggcattgagcgcatgggcccgctgggcctcgaccacatggcctccancattgancgcatgggccagaccatggagcgcattggctctggcgtggagcncatgggtgccggcatggg

SEQ ID NO: 400 - DNA, 548 bp, Homo sapiens
acatcaactacttcctcattttaaggtatggcagttcccttcatccccttttcctgccttgtacatgtacatgtatgaaatttccttctcttaccgaactctctccacacatcacaaggtcaaagaaccacacgcttagaagggtaagagggcaccctatgaaatgaaatggtgatttcttgagtctcttttttccacgtttaaggggccatggcaggacttagagttgcgagttaagactgcagagggctagagaattatttcatacaggctttgaggccacccatgtcacttatcccgtataccctctcaccatccccttgtctactctgatgcccccaagatgcaactgggcagctagttggccccataattctgggcctttgttgtttgttttaattacttgggcatcccaggaagctttccagtgatctcctaccatgggcccccctcctgggatcaagcccctcccaggccctgtccccagcccctcctgccccagcccacccgcttgccttggtgctcagccctcccattgggagcaggtt

SEQ ID NO: 401 - DNA, 355 bp, Homo sapiens
  misc_feature (1)...(355): n = A,T,C or G
actgtttccatgttatgtttctacacattgctacctcagtgctcctggaaacttagcttttgatgtctccaagtagtccaccttcatttaactctttgaaactgtatcatctttgccaagtaagagtggtggcctatttcagctgctttgacaaaatgactggctcctgacttaacgttctataaatgaatgtgctgaagcaaagtgcccatggtggcggcgaagaaganaaagatgtgttttgttttggactctctgtggtcccttccaatgctgngggtttccaaccaggggaagggtcccttttgcattgccaagtgccataaccatgagcactactctaccatggntctgc

SEQ ID NO: 402 - DNA, 407 bp, Homo sapiens
  misc_feature (1)...(407): n = A,T,C or G
atggggcaagctggataaagaaccaagacccactggagtatgctgtcttcaagaaacccatctcacatgcggtggcatacataggctcaaaataaaggaatggagaaaaatatttcaagcaaatggaaaacagaaaaaagcaggtgttgcactcctactttctgacaaaacagactatgcgaataaagataaaaaagagaaggacattacaaaggtggtcctgacctttgataaatctcattgcttgataccaacctgggctgttttaattgcccaaaccaaaaggataatttgctgaggttgtggagcttctcccctgcagagagtccctgatctcccaaaatttggttgagatgtaaggntgattttgctgacaactccttttctgaagttttactcatttccaa

SEQ ID NO: 403 - DNA, 303 bp, Homo sapiens
  misc_feature (1)...(303): n = A,T,C or G
cagtatttatagccnaactgaaaagctagtagcaggcaagtctcaaatccaggcaccaaatcctaagcaagagccatggcatggtgaaaatgcaaaaggagagtctggccaatctacaaatagagaacaagacctactcagtcatgaacaaaaaggcagacaccaacatggatctcatgggggattggatattgtaattatagagcaggaagatgacagtgatcgtcatttggcacaacatcttaacaacgaccgaaacccattatttacataaacctccattcggtaaccatgttgaaagga

SEQ ID NO: 404 - DNA, 225 bp, Homo sapiens
aagtgtaacttttaaaaatttagtggattttgaaaattcttagaggaaagtaaaggaaaaattgttaatgcactcatttacctttacatggtgaaagttctctcttgatcctacaaacagacattttccactcgtgtttccatagttgttaagtgtatcagatgtgttgggcatgtgaatctccaagtgcctgtgtaataaataaagtatctttatttcattcat

SEQ ID NO: 405 - DNA, 334 bp, Homo sapiens
  misc_feature (1)...(334): n = A,T,C or G
gagctgttatactgtgagttctactaggaaatcatcaaatctgagggttgtctggaggacttcaatacacctccccccatagtgaatcagcttccagggggtccagtccctctccttacttcatccccatcccatgccaaaggaagaccctccctccttggctcacagccttctctaggcttcccagtgcctccaggacagagtgggttatgttttcagctccatccttgctgtgagtgtctggtgcggttgtgcctccagcttctgctcagtgcttcatggacagtgtccagcccatgtcactctccactctctcanngtggatcccacccct

SEQ ID NO: 406 - DNA, 216 bp, Homo sapiens
  misc_feature (1)...(216): n = A,T,C or G
tttcatacctaatgagggagttganatnacatnnaaccaggaaatgcatggatctcaanggaaacaaacacccaataaactcggagtggcagactgacaactgtgagacatgcacttgctacnaaacacaaatttnatgttgcacccttgtttctacacctgtgggttatgacaaagacaactgccaaagaatnttcaagaaggaggactgccant

SEQ ID NO: 407 - DNA, 413 bp, Homo sapiens
gctgacttgctagtatcatctgcattcattgaagcacaagaacttcatgccttgactcatgtaaatgcaataggattaaaaaataaatttgatatcacatggaaacagacaaaaaatattgtacaacattgcacccagtgtcagattctacacctggccactcaggaagcaagagttaatcccagaggtctatgtcctaatgtgttatggcaaatggatgtcatgcacgtaccttcatttggaaaattgtcatttgtccatgtgacagttgatacttattcacatttcatatgggcaacctgccagacaggagaaagtcttcccatgttaaaagacatttattatcttgttttcctgtcatgggagttccagaaaaagttaaaacagacaatgggccaggttctgtagtaaag

SEQ ID NO: 408 - DNA, 183 bp, Homo sapiens
  misc_feature (1)...(183): n = A,T,C or G
ggagctngccctcaattcctccatntctatgttancatatttaatgtcttttgnnattaatncttaactagttaatccttaaagggctanntaatccttaactagtccctccattgtgagcattatccttccagtattcnccttctnttttatttactccttcctggctacccatgtactntt

SEQ ID NO: 409 - DNA, 250 bp, Homo sapiens
  misc_feature (1)...(250): n = A,T,C or G
cccacgcatgataagctctttatttctgtaagtcctgctaggaaatcatcaaatctgacggtggtttgggggacctgaacaaacctcctgtaattaatcagctttcagtttctccccctagtccctccttcaacaacataggaggatcctccccttctttctgctcacggccttatctaggcttcccagtgcccccaggacagcgtgggctatgtttacagcgcntccttgctgggggggggccntatgc

SEQ ID NO: 410 - DNA, 306 bp, Homo sapiens
  misc_feature (1)...(306): n = A,T,C or G
ggctggtttgcaagaatgaaatgaatgattctacagctaggacttaaccttgaaatggaaagtcttgcaatcccatttgcaggatccgtctgtgcacatgcctctgtagagagcagcattcccagggaccttggaaacagttggcactgtaaggtgcttgctccccaagacacatcctaaaaggtgttgtaatggtgaaaaccgcttccttctttattgccccttcttatttatgtgaacnactggttggctttttttgnatcttttttaaactggaaagttcaattgngaaaatgaatatcntgc

SEQ ID NO: 411 - DNA, 261 bp, Homo sapiens
  misc_feature (1)...(261): n = A,T,C or G
agagatattncttaggtnaaagttcatagagttcccatgaactatatgactggccacacaggatcttttgtatttaaggattctgagattttgcttgagcaggattagataaggctgttctttaaatgtctgaaatggaacagatttcaaaaaaaaaccccacaatctagggtgggaacaaggaaggaaagatgtgaataggctgatgggcaaaaaaccaatttacccatcagttccagccttctctcaaggngaggcaaa

SEQ ID NO: 412 - DNA, 241 bp, Homo sapiens
  misc_feature (1)...(241): n = A,T,C or G
gttcaatgttacctgacatttctacaacaccccactcaccgatgtattcgttgcccagtgggaacataccagcctgaatttggaaaaaataattgtgtttcttgcccaggaaatactacgactgactttgatggctccacaaacataacccagtgtaaaaacagaagatgtggaggggagctgggagatttcactgggtacattgaattcccaaactacccangcaattacccagccaaca

SEQ ID NO: 413 - DNA, 231 bp, Homo sapiens
  misc_feature (1)...(231): n = A,T,C or G
aactcttacaatccaagtgactcatctgtgtgcttgaatcctttccactgtctcatctccctcatccaagtttctagtaccttctctttgttgtgaaggataatcaaactgaacaacaaaaagtttactctcctcatttggaacctaaaaactctcttcttcctgggtctgagggctccaagaatccttgaatcanttctcagatcattggggacaccanatcaggaacct

SEQ ID NO: 414 - DNA, 234 bp, Homo sapiens
actgtccatgaagcactgagcagaagctggaggcacaacgcaccagacactcacagcaaggatggagctgaaaacataacccactctgtcctggaggcactgggaagcctagagaaggctgtgagccaaggagggagggtcttcctttggcatgggatggggatgaagtaaggagagggactggaccccctggaagctgattcactatggggggaggtgtattgaagtcctcca

SEQ ID NO: 415 - DNA, 217 bp, Homo sapiens
  misc_feature (1)...(217): n = A,T,C or G
gcataggattaagactgagtatcttttctacattcttttaactttctaaggggcacttctcaaaacacagaccaggtagcaaatctccactgctctaaggntctcaccaccactttctcacacctagcaatagtagaattcagtcctacttctgaggccagaagaatggttcagaaaaatantggattataaaaaataacaattaagaaaaataatc

SEQ ID NO: 416 - DNA, 213 bp, Homo sapiens
  misc_feature (1)...(213): n = A,T,C or G
atgcatatntaaagganactgcctcgcttttagaagacatctggnctgctctctgcatgaggcacagcagtaaagctctttgattcccagaatcaagaactctccccttcagactattaccgaatgcaaggtggttaattgaaggccactaattgatgctcaaatagaaggatattgactatattggaacagatggagtctctactacaaaag

SEQ ID NO: 417 - DNA, 303 bp, Homo sapiens
  misc_feature (1)...(303): n = A,T,C or G
nagtcttcaggcccatcagggaagttcacactggagagaagtcatacatatgtactgtatgtgggaaaggctttactctgagttcaaatcttcaagcccatcagagagtccacactggagagaagccatacaaatgcaatgagtgtgggaagagcttcaggagggattcccattatcaagttcatctagtggtccacacaggagagaaaccctataaatgtgagatatgtgggaagggcttcantcaaagttcgtatcttcaaatccatcngaaggnccacagtatananaaaccttttaagt

SEQ ID NO: 418 - DNA, 328 bp, Homo sapiens
  misc_feature (1)...(328): n = A,T,C or G
tttttggcggtggtggggcagggacgggacangagtctcactctgttgcccaggctggagtgcacaggcatgatctcggctcactacaacccctgcctcccatgtccaagcgattcttgtgcctcagccttccctgtagctagaattacaggcacatgccaccacacccagctagtttttgtatttttagtagagacagggtttcaccatgttggccaggctggtctcaaactcctnacctcagnggtcaggctggtctcaaactcctgacctcaagtgatctgcccacctcagcctcccaaagtgctangattacaggccgtgagcc

SEQ ID NO: 419 - DNA, 389 bp, Homo sapiens
  misc_feature (1)...(389): n = A,T,C or G
cctcctcaagacggcctgtggtccgcctcccggcaaccaagaagcctgcagtgccatatgacccctgagccatggactggagcctgaaaggcagcgtacaccctgctcctgatcttgctgcttgtttcctctctgtggctccattcatagcacagttgttgcactgaggcttgtgcaggccgagcaaggccaagctggctcaaagagcaaccagtcaactctgccacggtgtgccaggcaccggttctccagccaccaacctcactcgctcccgcaaatggcacatcagttcttctaccctaaaggtaggaccaaagggcatctgcttttctgaagtcctctgctctatcagccatcacgtggcagccactcnggctgtgtcgacgcgg

SEQ ID NO: 420 - DNA, 408 bp, Homo sapiens
gttcctcctaactcctgccagaaacagctctcctcaacatgagagctgcacccctcctcctggccagggcagcaagccttagccttggcttcttgtttctgctttttttctggctagaccgaagtgtactagccaaggagttgaagtttgtgactttggtgtttcggcatggagaccgaagtcccattgacacctttcccactgaccccataaaggaatcctcatggccacaaggatttggccaactcacccagctgggcatggagcagcattatgaacttggagagtatataagaaagagatatagaaaattcttgaatgagtcctataaacatgaacaggtttatattcgaagcacagacgttgaccggactttgatgaagtgctatgacaaacctggcaagcccg

SEQ ID NO: 421 - DNA, 352 bp, Homo sapiens
  misc_feature (1)...(352): n = A,T,C or G
gctcaaaaatctttttactgatnggcatggctacacaatcattgactattacggaggccagaggagaatgaggcctggcctgggagccctgtgcctactanaagcacattagattatccattcactgacagaacaggtcttttttgggtccttcttctccaccacnatatacttgcagtcctccttcttgaagattctttggcagttgtctttgtcataacccacaggtgtagaaacaagggtgcaacatgaaatttctgtttcgtagcaagtgcatgtctcacaagttggcangtctgccactccgagtttattgggtgtttgtttcctttgagatccatgcatttcctgg

SEQ ID NO: 422 - DNA, 337 bp, Homo sapiens
atgccaccatgctggcaatgcagcgggcggtcgaaggcctgcatatccagcccaagctggcgatgatcgacggcaaccgttgcccgaagttgccgatgccagccgaagcggtggtcaagggcgatagcaaggtgccggcgatcgcggcggcgtcaatcctggccaaggtcagccgtgatcgtgaaatggcagctgtcgaattgatctacccgggttatggcatcggcgggcataagggctatccgacaccggtgcacctggaagccttgcagcggctggggccgacgccgattcaccgacgcttcttccgccggtacggctggcctatgaaaattat

SEQ ID NO: 423 - DNA, 310 bp, Homo sapiens
  misc_feature (1)...(310): n = A,T,C or G
gctcaaaaatctttttactgatatggcatggctacacaatcattgactattagaggccagaggagaatgaggcctggcctgggagccctgtgcctactanaagcncattagattatccattcactgacagaacaggtcttttttgggtccttcttctccaccacgatatacttgcagtcctccttcttgaagattctttggcagttgtctttgtcataacccacaggtgtanaaacaagggtgcaacatgaaatttctgtttcgtagcaagtgcatgtctcacagttgtcaagtctgccctccgagttta

SEQ ID NO: 424 - DNA, 370 bp, Homo sapiens
  misc_feature (1)...(370): n = A,T,C or G
gctcaaaaatctttttactgataggcatggctacacaatcattgactattagaggccagaggagaatgaggcctggcctgggagccctgtgcctactagaagcacattagattatccattcactgacagaacaggtcttttttgggtccttcttctccaccacgatatacttgcagtcctccttcttgaagattctttggcagttgtctttgtcataacccacaggtgtagaaacatcctggttgaatctcctggaactccctcattaggtatgaaatagcatgatgcattgcataaagtcacgaaggtggcaaagatcacaacgctgcccagganaacattcattgtgataagcaggactccgtcgacg

SEQ ID NO: 425 - DNA, 216 bp, Homo sapiens
  misc_feature (1)...(216): n = A,T,C or G
aattgctatnntttattttgccactcaaaataattaccaaaaaaaaaaaatnttaaatgataacaacncaacatcaaggnaaananaacaggaatggntgactntgcataaatnggccgaanattatccattatnttaagggttgacttcaggntacagcacacagacaaacatgcccaggaggntntcaggaccgctcgatgtnttntgaggagg

SEQ ID NO: 426 - DNA, 596 bp, Homo sapiens
cttccagtgaggataaccctgttgccccgggccgaggttctccattaggctctgattgattggcagtcagtgatggaagggtgttctgatcattccgactgccccaagggtcgctggccagctctctgttttgctgagttggcagtaggacctaatttgttaattaagagtagatggtgagctgtccttgtattttgattaacctaatggccttcccagcacgactcggattcagctggagacatcacggcaacttttaatgaaatgatttgaagggccattaagaggcacttcccgttattaggcagttcatctgcactgataacttcttggcagctgagctggtcggagctgtggcccaaacgcacacttggcttttggttttgagatacaactcttaatcttttagtcatgcttgagggtggatggccttttcagctttaacccaatttgcactgccttggaagtgtagccaggagaatacactcatatactcgtgggcttagaggccacagcagatgtcattggtctactgcctgagtcccgctggtcccatcccaggaccttccatcggcgagtacctgggagcccgtgct

SEQ ID NO: 427 - DNA, 107 bp, Homo sapiens
  misc_feature (1)...(107): n = A,T,C or G
gaagaattcaagttaggtttattcaaagggcttacngagaatcctanacccaggncccagcccgggagcagccttanagagctcctgtttgactgcccggctcagng

SEQ ID NO: 428 - DNA, 38 bp, Homo sapiens
  misc_feature (1)...(38): n = A,T,C or G
gaacttccnaanaangactttattcactattttacatt

SEQ ID NO: 429 - DNA, 544 bp, Homo sapiens
ctttgctggacggaataaaagtggacgcaagcatgacctcctgatgagggcgctgcatttattgaagagcggctgcagccctgcggttcagattaaaatccgagaattgtatagacgccgatatccacgaactcttgaaggactttctgatttatccacaatcaaatcatcggttttcagtttggatggtggctcatcacctgtagaacctgacttggccgtggctggaatccactcgttgccttccacttcagttacacctcactcaccatcctctcctgttggttctgtgctgcttcaagatactaagcccacatttgagatgcagcagccatctcccccaattcctcctgtccatcctgatgtgcagttaaaaaatctgcccttttatgatgtccttgatgttctcatcaagcccacgagtttagttcaaagcagtattcagcgatttcaagagaagttttttatttttgctttgacacctcaacaagttagagagatatgcatatccagggattttttgccaggtggtaggagagattat

SEQ ID NO: 430 - DNA, 507 bp, Homo sapiens
  misc_feature (1)...(507): n = A,T,C or G
cttatcncaatggggctcccaaacttggctgtgcagtggaaactccgggggaattttgaagaacactgacacccatcttccaccccgacactctgatttaattgggctgcagtgagaacagagcatcaatttaaaaagctgcccagaatgttntcctgggcagcgttgtgatctttgccnccttcgtgactttatgcaatgcatcatgctatttcatacctaatgagggagttccaggagattcaaccaggatgtttctacncctgtgggttatgacaaagacaactgccaaagaatnttcaagaaggaggactgcaagtatatcgtggtggagaagaaggacccaaaaaagacctgttctgtcagtgaatggataatctaatgtgcttctagtaggcacagggctcccaggccaggcctcattctcctctggcctctaatagtcaatgattgtgtagccatgcctatcagtaaaaagatttttgagcaaaaaaaaaaaaaaaaaaa

SEQ ID NO: 431 - DNA, 392 bp, Homo sapiens
  misc_feature (1)...(392): n = A,T,C or G
gaaaattcagaatggataaaaacaaatgaagtacaaaatatttcagatttacatagcgataaacaagaaagcacttatcaggaggacttacaaatggaagtacactctanaaccatcatctatcatggctaaatgtgagattagcacagctgtattatttgtacattgcaaacacctagaaagagatgggaaacaaaatcccaggagttttgtgtgtggagtcctgggttttccaacagacatcattccagcattctgagattagggngattggggatcattctggagttggaatgttcaacaaaagtgatgttgttaggtaaaatgtacaacttctggatctatgcagacattgaaggtgcaatgagtctggcttttactctgctgtttct

SEQ ID NO: 432 - DNA, 387 bp, Homo sapiens
  misc_feature (1)...(387): n = A,T,C or G
ggtatccntacataatcaaatatagctgtagtacatgttttcattggngtagattaccacaaatgcaaggcaacatgtgtagatctcttgtcttattcttttgtctataatactgtattgngtagtccaagctctcggnagtccagccactgngaaacatgctccctttagattaacctcgtggacnctnttgttgnattgtctgaactgtagngccctgtattttgcttctgtctgngaattctgttgcttctggggcatttccttgngatgcagaggaccaccacacagatgacagcaatctgaattgntccaatcacagctgcgattaagacatactgaaatcgtacaggaccgggaacaacgtatagaacactggagtccttt

SEQ ID NO: 433 - DNA, 281 bp, Homo sapiens
  misc_feature (1)...(281): n = A,T,C or G
ttcaactagcanagaanactgcttcagggngtgtaaaatgaaaggcttccacgcagttatctgattaaagaacactaagagagggacaaggctagaagccgcaggatgtctacactatagcaggcnctatttgggttggctggaggagctgtggaaaacatggagagattggcgctggagatcgccgtggctattcctcnttgntattacaccagngaggntctctgtntgcccactggttnnaaaaccgntatacaataatgatagaataggacacacat

SEQ ID NO: 434 - DNA, 484 bp, Homo sapiens
ttttaaaataagcatttagtgctcagtccctactgagtactctttctctcccctcctctgaatttaattctttcaacttgcaatttgcaaggattacacatttcactgtgatgtatattgtgttgcaaaaaaaaaaaagtgtctttgtttaaaattacttggtttgtgaatccatcttgctttttccccattggaactagtcattaacccatctctgaactggtagaaaaacatctgaagagctagtctatcagcatctgacaggtgaattggatggttctcagaaccatttcacccagacagcctgtttctatcctgtttaataaattagtttgggttctctacatgcataacaaaccctgctccaatctgtcacataaaagtctgtgacttgaagtttagtcagcacccccaccaaactttatttttctatgtgttttttgcaacatatgagtgttttgaaaataaagtacccatgtcttta

SEQ ID NO: 435 - DNA, 424 bp, Homo sapiens
gcgccgctcagagcaggtcactttctgccttccacgtcctccttcaaggaagccccatgtgggtagctttcaatatcgcaggttcttactcctctgcctctataagctcaaacccaccaacgatcgggcaagtaaaccccctccctcgccgacttcggaactggcgagagttcagcgcagatgggcctgtggggagggggcaagatagatgagggggagcggcatggtgcggggtgaccccttggagagaggaaaaaggccacaagaggggctgccaccgccactaacggagatggccctggtagagacctttgggggtctggaacctctggactccccatgctctaactcccacactctgctatcagaaacttaaacttgaggattttctctgtttttcactcgcaataaattcagagcaaac

SEQ ID NO: 436 - DNA, 667 bp, Homo sapiens
  misc_feature (1)...(667): n = A,T,C or G
accttgggaanactctcacaatataaagggtcgtagactttactccaaattccaaaaaggtcctggccatgtaatcctgaaagttttcccaaggtagctataaaatccttataagggtgcagcctcttctggaattcctctgatttcaaagtctcactctcaagttcttgaaaacgagggcagttcctgaaaggcaggtatagcaactgatcttcagaaagaggaactgtgtgcaccgggatgggctgccagagtaggataggattccagatgctgacaccttctgggggaaacagggctgccaggtttgtcatagcactcatcaaagtccggtcaacgtctgtgcttcgaatataaacctgttcatgtttataggactcattcaagaattttctatatctctttcttatatactctccaagttcataatgctgctccatgcccagctgggtgagttggccaaatccttgtggccatgaggattcctttatggggtcagtgggaaaggtgtcaatgggacttcggtctccatgccgaaacaccaaagtcacaaacttcaactccttggctagtacacttcggtctagccagaaaaaaagcagaaacaagaagccaaggctaaggcttgctgccctgccaggaggaggggtgcagctctcatgttgag

SEQ ID NO: 437 - DNA, 693 bp, Homo sapiens
ctacgtctcaaccctcatttttaggtaaggaatcttaagtccaaagatattaagtgactcacacagccaggtaaggaaagctggattggcacactaggactctaccataccgggttttgttaaagctcaggttaggaggctgataagcttggaaggaacttcagacagctttttcagatcataaaagataattcttagcccatgttcttctccagagcagacctgaaatgacagcacagcaggtactcctctattttcacccctcttgcttctactctctggcagtcagacctgtgggaggccatgggagaaagcagctctctggatgtttgtacagatcatggactattctctgtggaccatttctccaggttaccctaggtgtcactattggggggacagccagcatctttagctttcatttgagtttctgtctgtcttcagtagaggaaacttttgctcttcacacttcacatctgaacacctaactgctgttgctcctgaggtggtgaaagacagatatagagcttacagtatttatcctatttctaggcactgagggctgtggggtaccttgtggtgccaaaacagatcctgttttaaggacatgttgcttcagagatgtctgtaactatctgggggctctgttggctctttaccctgcatcatgtgctctcttggctgaaaatgacc

SEQ ID NO: 438 - DNA, 360 bp, Homo sapiens
ctgcttatcacaatgaatgttctcctgggcagcgttgtgatctttgccaccttcgtgactttatgcaatgcatcatgctatttcatacctaatgagggagttccaggagattcaaccaggatgtttctacacctgtgggttatgacaaagacaactgccaaagaatcttcaagaaggaggactgcaagtatatctggtggagaagaaggacccaaaaaagacctgttctgtcagtgaatggataatctaatgtgcttctagtaggcacagggctcccaggccaggcctcattctcctctggcctctaatagtcaataattgtgtagccatgcctatcagtaaaaagatttttgagcaaac

SEQ ID NO: 439 - DNA, 431 bp, Homo sapiens
  misc_feature (1)...(431): n = A,T,C or G
gttcctnntaactcctgccagaaacagctctcctcaacatgagagctgcacccctcctcctggccagggcagcaagccttagccttggcttcttgtttctgctttttttctggctagaccgaagtgtactagccaaggagttgaagtttgtgactttggtgtttcggcatggagaccgaagtcccattgacacctttcccactgaccccataaaggaatcctcatggccacaaggatttggccaactcacccagctgggcatggagcagcattatgaacttggagagtatataagaaagagatatagaaaattcttgaatgagtcctataaacatgaacaggtttatattcgaagcacagacgttgaccggactttgatgagtgctatgacaaacctggcagcccgtcgacgcggccgcgaatttagtagt

SEQ ID NO: 440 - DNA, 523 bp, Homo sapiens
agagataaagcttaggtcaaagttcatagagttcccatgaactatatgactggccacacaggatcttttgtatttaaggattctgagattttgcttgagcaggattagataaggctgttctttaaatgtctgaaatggaacagatttcaaaaaaaaaccccacaatctagggtgggaacaaggaaggaaagatgtgaataggctgatgggcaaaaaaccaatttacccatcagttccagccttctctcaaggagaggcaaagaaaggagatacagtggagacatctggaaagttttctccactggaaaactgctactatctgtttttatatttctgttaaaatatatgaggctacagaactaaaaattaaaacctctttgtgtcccttggtcctggaacatttatgttccttttaaagaaacaaaaatcaaactttacagaaagatttgatgtatgtaatacatatagcagctcttgaagtatatatatcatagcaaataagtcatctgatgagaacaagcta

SEQ ID NO: 441 - DNA, 430 bp, Homo sapiens
gttcctcctaactcctgccagaaacagctctcctcaacatgagagctgcacccctcctcctggccagggcagcaagccttagccttggcttcttgtttctgctttttttctggctagaccgaagtgtactagccaaggagttgaagtttgtgactttggtgtttcggcatggagaccgaagtcccattgacacctttcccactgaccccataaaggaatcctcatggccacaaggatttggccaactcacccagctgggcatggagcagcattatgaacttggagagtatataagaaagagatatagaaaattcttgaatgagtcctataaacatgaacaggtttatattcgaagcacagacgttgaccggactttgatgagtgctatgacaaacctggcagcccgtcgacgcggccgcgaatttagtag

SEQ ID NO: 442 - DNA, 362 bp, Homo sapiens
ctaaggaattagtagtgttcccatcacttgtttggagtgtgctattctaaaagattttgatttcctggaatgacaattatattttaactttggtgggggaaagagttataggaccacagtcttcacttctgatacttgtaaattaatcttttattgcacttgttttgaccattaagctatatgtttagaaatggtcattttacggaaaaattagaaaaattctgataatagtgcagaataaatgaattaatgttttacttaatttatattgaactgtcaatgacaaataaaaattctttttgattattttttgttttcatttaccagaataaaaactaagaattaaaagtttgattacagtc

SEQ ID NO: 443 - DNA, 624 bp, Homo sapiens
  misc_feature (1)...(624): n = A,T,C or G
ttttttttttgcaacacaatatacatcacagtgaaatgtgtaatccttgcaaattgcaagttgaaagaattaaattcagaggaggggagagaaagagtactcagtagggactgagcactaaatgcttattttaaaagaaatgtaaagagcagaaagcaattcaggctaccctgccttttgtgctggctagtactccggtcggtgtcagcagcacgtggcattgaacattgcaatgtggagcccaaaccacagaaaatggggtgaaattggccaactttctattaacttggcttcctgttttataaaatattgtgaataatatcacctacttcaaagggcagttatgaggcttaaatgaactaacgcctacaaaacacttaaacatagataacataggtgcaagtactatgtatctggtacatggtaaacatccttattattaaagtcaacgctaaaatgaatgtgtgtgcatatgctaatagtacagagagagggcacttaaaccaactaagggcctggagggaaggtttcctggaaagangatgcttgtgctgggtccaaatcttggtctactatgaccttggccaaattatttaaactttgtccctatctgctaaacagatc

SEQ ID NO: 444 - DNA, 425 bp, Homo sapiens
  misc_feature (1)...(425): n = A,T,C or G
gcacatcattnntcttgcattctttgagaataagaagatcagtaaatagttcagaagtgggaagctttgtccaggcctgtgtgtgaacccaatgttttgcttagaaatagaacaagtaagttcattgctatagcataacacaaaatttgcataagtggtggtcagcaaatccttgaatgctgcttaatgtgagaggttggtaaaatcctttgtgcaacactctaactccctgaatgttttgctgtgctgggacctgtgcatgccagacaaggccaagctggctgaaagagcaaccagccacctctgcaatctgccacctcctgctggcaggatttgtttttgcatcctgtgaagagccaaggaggcaccagggcataagtgagtagacttatggtcgacgcggccgcgaatttagtagtagtaga

SEQ ID NO: 445 - DNA, 414 bp, Homo sapiens
  misc_feature (1)...(414): n = A,T,C or G
catgtttatgnttttggattactttgggcacctagtgtttctaaatcgtctatcattcttttctgtttttcaaaagcagagatggccagagtctcaacaaactgtatcttcaagtctttgtgaaattctttgcatgtggcagattattggatgtagtttcctttaactagcatataaatctggtgtgtttcagataaatgaacagcaaaatgtggtggaattaccatttggaacattgtgaatgaaaaattgtgtctctagattatgtaacaaataactatttcctaaccattgatctttggatttttataatcctactcacaaatgactaggcttctcctcttgtattttgaagcagtgtgggtgctggattgataaaaaaaaaaaaagtcgacgcggccgcgaatttagtag

SEQ ID NO: 446 - DNA, 631 bp, Homo sapiens
  misc_feature (1)...(631): n = A,T,C or G
acaaattagaanaaagtgccagagaacaccacataccttgtccggaacattacaatggcttctgcatgcatgggaagtgtgagcattctatcaatatgcaggagccatcttgcaggtgtgatgctggttatactggacaacactgtgaaaaaaaggactacagtgttctatacgttgttcccggtcctgtacgatttcagtatgtcttaatcgcagctgtgattggaacaattcagattgctgtcatctgtgtggtggtcctctgcatcacaagggccaaactttaggtaatagcattggactgagatttgtaaactttccaaccttccaggaaatgccccagaagcaacagaattcacagacagaagcaaaatacagggcactacagttcagacaatacaacaagagcgtccacgaggttaatctaaagggagcatgtttcacagtggctggactaccgagagcttggactacacaatacagtattatagacaaaagaataagacaagagatctacacatgttgccttgcatttgtggtaatctacaccaatgaaaacatgtactacagctatatttgattatgtatggatatatttgaaatagtatacattgtcttgatgttttttctg

SEQ ID NO: 447 - DNA, 585 bp, Homo sapiens
  misc_feature (1)...(585): n = A,T,C or G
ccttgggaaaantntcacaatataaagggtcgtagactttactccaaattccaaaaaggtcctggccatgtaatcctgaaagttttcccaaggtagctataaaatccttataagggtgcagcctcttctggaattcctctgatttcaaagtctcactctcaagttcttgaaaacgagggcagttcctgaaaggcaggtatagcaactgatcttcagaaagaggaactgtgtgcaccgggatgggctgccagagtaggataggattccagatgctgacaccttctgggggaaacagggctgccaggtttgtcatagcactcatcaaagtccggtcaacgtctgtgcttcgaatataaacctgttcatgtttataggactcattcaagaattttctatatctctttcttatatactctccaagttcataatgctgctccatgcccagctgggtgagttggccaaatccttgtggccatgaggattcctttatggggtcagtgggaaaggtgtcaatgggacttcggtctccatgccgaaacaccaaagtcacaaacttcaactccttggctagtacacttcggtcta

SEQ ID NO: 448 - DNA, 93 bp, Homo sapiens
  misc_feature (1)...(93): n = A,T,C or G
tgctcgtgggtcattctgannnccgaactgaccntgccagccctgccgangggccnccatggctccctagtgccctggagagganggggctag

SEQ ID NO: 449 - DNA, 706 bp, Homo sapiens
  misc_feature (1)...(706): n = A,T,C or G
ccaagttcatgctntgtgctggacgctggacagggggcaaaagcnnttgctcgtgggtcattctgancaccgaactgaccatgccagccctgccgatggtcctccatggctccctagtgccctggagaggaggtgtctagtcagagagtagtcctggaaggtggcctctgngaggagccacggggacagcatcctgcagatggtcgggcgcgtcccattcgccattcaggctgcgcaactgttgggaagggcgatcggtgcgggcctcttcgctattacgccagctggcgaaagggggatgtgctgcaaggcgattaagttgggtaacgccagggttttcccagtcncgacgttgtaaaacgacggccagtgaattgaatttaggtgacnctatagaagagctatgacgtcgcatgcacgcgtacgtaagcttggatcctctagagcggccgcctactactactaaattcgcggccgcgtcgacgtgggatccncactgagagagtggagagtgacatgtgctggacnctgtccatgaagcactgagcagaagctggaggcacaacgcnccagacactcacagctactcaggaggctgagaacaggttgaacctgggaggtggaggttgcaatgagctgagatcaggccnctgcnccccagcatggatgacagagtgaaactccatcttaaaaaaaaaaaaaaaaa

SEQ ID NO: 450 - DNA, 493 bp, Homo sapiens
gagacggagtgtcactctgttgcccaggctggagtgcagcaagacactgtctaagaaaaaacagttttaaaaggtaaaacaacataaaaagaaatatcctatagtggaaataagagagtcaaatgaggctgagaactttacaaagggatcttacagacatgtcgccaatatcactgcatgagcctaagtataagaacaacctttggggagaaaccatcatttgacagtgaggtacaattccaagtcaggtagtgaaatgggtggaattaaactcaaattaatcctgccagctgaaacgcaagagacactgtcagagagttaaaaagtgagttctatccatgaggtgattccacagtcttctcaagtcaacacatctgtgaactcacagaccaagttcttaaaccactgttcaaactctgctacacatcagaatcacctggagagctttacaaactcccattgccgagggtcgacgcggccgcgaatttagtag

SEQ ID NO: 451 - DNA, 501 bp, Homo sapiens
  misc_feature (1)...(501): n = A,T,C or G
gggcgcgtcccattcgccattcaggctgcgcaactgttgggaagggcgatcggtgcgggcctcttcgctattacgccagctggcgaaagggggatgtgctgcaaggcgattaagttgggtaacgccagggttttcccagtcncgacgttgtaaaacgacggccagtgaattgaatttaggtgacnctatagaagagctatgacgtcgcatgcacgcgtacgtaagcttggatcctctagagcggccgcctactactactaaattcgcggccgcgtcgacgtgggatccncactgagagagtggagagtgacatgtgctggacnctgtccatgaagcactgagcagaagctggaggcacaacgcnccagacactcacagctactcaggaggctgagaacaggttgaacctgggaggtggaggttgcaatgagctgagatcaggccnctgcnccccagcatggatgacagagtgaaactccatcttaaaaaaaaaaaaaaaaa

SEQ ID NO: 452 - DNA, 51 bp, Homo sapiens
  misc_feature (1)...(51): n = A,T,C or G
agacggtttcaccnttacaacnccttttaggatgggnnttggggagcaagc

SEQ ID NO: 453 - DNA, 317 bp, Homo sapiens
  misc_feature (1)...(317): n = A,T,C or G
tacatcttgctttttccccattggaactagtcattaacccatctctgaactggtagaaaaacatctgaagagctagtctatcagcatctggcaagtgaattggatggttctcagaaccatttcacccanacagcctgtttctatcctgtttaataaattagtttgggttctctacatgcataacaaaccctgctccaatctgtcacataaaagtctgtgacttgaagtttantcagcacccccaccaaactttatttttctatgtgttttttgcaacatatgagtgttttgaaaataaggtacccatgtctttatta

SEQ ID NO: 454 - DNA, 231 bp, Homo sapiens
ttcgaggtacaatcaactctcagagtgtagtttccttctatagatgagtcagcattaatataagccacgccacgctcttgaaggagtcttgaattctcctctgctcactcagtagaaccaagaagaccaaattcttctgcatcccagcttgcaaacaaaattgttcttctaggtctccacccttcctttttcagtgttccaaagctcctcacaatttcatgaacaacagct

SEQ ID NO: 455 - DNA, 231 bp, Homo sapiens
taccaaagagggcataataatcagtctcacagtagggttcaccatcctccaagtgaaaaacattgttccgaatgggctttccacaggctacacacacaaaacaggaaacatgccaagtttgtttcaacgcattgatgacttctccaaggatcttcctttggcatcgaccacattcaggggcaaagaatttctcatagcacagctcacaatacagggctcctttctcctcta

SEQ ID NO: 456 - DNA, 231 bp, Homo sapiens
ttggcaggtacccttacaaagaagacaccataccttatgcgttattaggtggaataatcattccattcagtattatcgttattattcttggagaaaccctgtctgtttactgtaaccttttgcactcaaattcctttatcaggaataactacatagccactatttacaaagccattggaacctttttatttggtgcagctgctagtcagtccctgactgacattgccaagt

SEQ ID NO: 457 - DNA, 231 bp, Homo sapiens
  misc_feature (1)...(231): n = A,T,C or G
cgaggtacccaggggtctgaaaatctctnntttantagtcgatagcaaaattgttcatcagcattccttaatatgatcttgctataattagatttttctccattagagttcatacagttttatttgattttattagcaatctctttcagaagacccttgagatcattaagctttgtatccagttgtctaaatcgatgcctcatttcctctgaggtgtcgctggcttttgtg

SEQ ID NO: 458 - DNA, 231 bp, Homo sapiens
aggtctggttccccccacttccactcccctctactctctctaggactgggctgggccaagagaagaggggtggttagggaagccgttgagacctgaagccccaccctctaccttccttcaacaccctaaccttgggtaacagcatttggaattatcatttgggatgagtagaatttccaaggtcctgggttaggcattttggggggccagaccccaggagaagaagattct

SEQ ID NO: 459 - DNA, 231 bp, Homo sapiens
ggtaccgaggctcgctgacacagagaaaccccaacgcgaggaaaggaatggccagccacaccttcgcgaaacctgtggtggcccaccagtcctaacgggacaggacagagagacagagcagccctgcactgttttccctccaccacagccatcctgtccctcattggctctgtgctttccactatacacagtcaccgtcccaatgagaaacaagaaggagcaccctccaca

SEQ ID NO: 460 - DNA, 231 bp, Homo sapiens
gcaggtataacatgctgcaacaacagatgtgactaggaacggccggtgacatggggagggcctatcaccctattcttgggggctgcttcttcacagtgatcatgaagcctagcagcaaatcccacctccccacacgcacacggccagcctggagcccacagaagggtcctcctgcagccagtggagcttggtccagcctccagtccacccctaccaggcttaaggatagaa

SEQ ID NO: 461 - DNA, 231 bp, Homo sapiens
cgaggtttgagaagctctaatgtgcaggggagccgagaagcaggcggcctagggagggtcgcgtgtgctccagaagagtgtgtgcatgccagaggggaaacaggcgcctgtgtgtcctgggtggggttcagtgaggagtgggaaattggttcagcagaaccaagccgttgggtgaataagagggggattccatggcactgatagagccctatagtttcagagctgggaatt

SEQ ID NO: 462 - DNA, 231 bp, Homo sapiens
aggtaccctcattgtagccatgggaaaattgatgttcagtggggatcagtgaattaaatggggtcatgcaagtataaaaattaaaaaaaaaagacttcatgcccaatctcatatgatgtggaagaactgttagagagaccaacagggtagtgggttagagatttccagagtcttacattttctagaggaggtatttaatttcttctcactcatccagtgttgtatttagga

SEQ ID NO: 463 - DNA, 231 bp, Homo sapiens
tactccagcctggtgacagagcgagaccctatcaccgccccccaccccaccaaaaaaaaaactgagtagacaggtgtcctcttggcatggtaagtcttaagtcccctcccagatctgtgacatttgacaggtgtcttttcctctggacctcggtgtccccatctgagtgagaaaaggcagtggggaggtggatcttccagtcgaagcggtatagaagcccgtgtgaaaagc

SEQ ID NO: 464 - DNA, 231 bp, Homo sapiens
gtactctaagattttatctaagttgccttttctgggtgggaaagtttaaccttagtgactaaggacatcacatatgaagaatgtttaagttggaggtggcaacgtgaattgcaaacagggcctgcttcagtgactgtgtgcctgtagtcccagctactcgggagtctgtgtgaggccaggggtgccagcgcaccagctagatgctctgtaacttctaggccccattttccc

SEQ ID NO: 465 - DNA, 231 bp, Homo sapiens
catgttgttgtagctgtggtaatgctggctgcatctcagacagggttaacttcagctcctgtggcaaattagcaacaaattctgacatcatatttatggtttctgtatctttgttgatgaaggatggcacaatttttgcttgtgttcataatatactcagattagttcagctccatcagataaactggagacatgcaggacattagggtagtgttgtagctctggtaatga

SEQ ID NO: 466 - DNA, 231 bp, Homo sapiens
caggtacctctttccattggatactgtgctagcaagcatgctctccggggtttttttaatggccttcgaacagaacttgccacatacccaggtataatagtttctaacatttgcccaggacctgtgcaatcaaatattgtggagaattccctagctggagaagtcacaaagactataggcaataatggagaccagtcccacaagatgacaaccagtcgttgtgtgcggctg

SEQ ID NO: 467 - DNA, 311 bp, Homo sapiens
gtacaccctggcacagtccaatctgaactggttcggcactcatctttcatgagatggatgtggtggcttttctcctttttcatcaagactcctcagcagggagcccagaccagcctgcactgtgccttaacagaaggtcttgagattctaagtgggaatcatttcagtgactgtcatgtggcatgggtctctgcccaagctcgtaatgagactatagcaaggcggctgtgggacgtcagttgtgacctgctgggcctcccaatagactaacaggcagtgccagttggacccaagagaagactgcagcagac

SEQ ID NO: 468 - DNA, 3112 bp, Homo sapiens
cattgtgttgggagaaaaacagaggggagatttgtgtggctgcagccgagggagaccaggaagatctgcatggtgggaaggacctgatgatacagagtttgataggagacaattaaaggctggaaggcactggatgcctgatgatgaagtggactttcaaactggggcactactgaaacgatgggatggccagagacacaggagatgagttggagcaagctcaataacaaagtggttcaacgaggacttggaattgcatggagctggagctgaagtttagcccaattgtttactagttgagtgaatgtggatgattggatgatcatttctcatctctgagcctcaggttccccatccataaaatgggatacacagtatgatctataaagtgggatatagtatgatctacttcactgggttatttgaaggatgaattgagataatttatttcaggtgcctagaacaatgcccagattagtacatttggtggaactgagaaatggcataacaccaaatttaatatatgtcagatgttactatgattatcattcaatctcatagttttgtcatggcccaatttatcctcacttgtgcctcaacaaattgaactgttaacaaaggaatctctggtcctgggtaatggctgagcaccactgagcatttccattccagttggcttcttgggtttgctagctgcatcactagtcatcttaaataaatgaagttttaacatttctccagtgatttttttatctcacctttgaagatactatgttatgtgattaaataaagaacttgagaagaacaggtttcattaaacataaaatcaatgtagacgcaaattttctggatgggcaatacttatgttcacaggaaatgctttaaaatatgcagaagataattaaatggcaatggacaaagtgaaaaacttagactttttttttttttttggaagtatctggatgttccttagtcacttaaaggagaactgaaaaatagcagtgagttccacataatccaacctgtgagattaaggctctttgtggggaaggacaaagatctgtaaatttacagtttccttccaaagccaacgtcgaattttgaaacatatcaaagctcttcttcaagacaaataatctatagtacatctttcttatgggatgcacttatgaaaaatggtggctgtcaacatctagtcactttagctctcaaaatggttcattttaagagaaagttttagaatctcatatttattcctgtggaaggacagcattgtggcttggactttataaggtctttattcaactaaataggtgagaaataagaaaggctgctgactttaccatctgaggccacacatctgctgaaatggagataattaacatcactagaaacagcaagatgacaatataatgtctaagtagtgacatgtttttgcacatttccagcccctttaaatatccacacacacaggaagcacaaaaggaagcacagagatccctgggagaaatgcccggccgccatcttgggtcatcgatgagcctcgccctgtgcctggtcccgcttgtgagggaaggacattagaaaatgaattgatgtgttccttaaaggatgggcaggaaaacagatcctgttgtggatatttatttgaacgggattacagatttgaaatgaagtcacaaagtgagcattaccaatgagaggaaaacagacgagaaaatcttgatggcttcacaagacatgcaacaaacaaaatggaatactgtgatgacatgaggcagccaagctggggaggagataaccacggggcagagggtcaggattctggccctgctgcctaaactgtgcgttcataaccaaatcatttcatatttctaaccctcaaaacaaagctgttgtaatatctgatctctacggttccttctgggcccaacattctccatatatccagccacactcatttttaatatttagttcccagatctgtactgtgacctttctacactgtagaataacattactcattttgttcaaagacccttcgtgttgctgcctaatatgtagctgactgtttttcctaaggagtgttctggcccaggggatctgtgaacaggctgggaagcatctcaagatctttccagggttatacttactagcacacagcatgatcattacggagtgaattatctaatcaacatcatcctcagtgtctttgcccatactgaaattcatttcccacttttgtgcccattctcaagacctcaaaatgtcattccattaatatcacaggattaacttttttttttaacctggaagaattcaatgttacatgcagctatgggaatttaattacatattttgttttccagtgcaaagatgactaagtcctttatccctcccctttgtttgattttttttccagtataaagttaaaatgcttagccttgtactgaggctgtatacagccacagcctctccccatccctccagccttatctgtcatcaccatcaacccctcccatgcacctaaacaaaatctaacttgtaattccttgaacatgtcaggcatacattattccttctgcctgagaagctcttccttgtctcttaaatctagaatgatgtaaagttttgaataagttgactatcttacttcatgcaaagaagggacacatatgagattcatcatcacatgagacagcaaatactaaaagtgtaatttgattataagagtttagataaatatatgaaatgcaagagccacagagggaatgtttatggggcacgtttgtaagcctgggatgtgaagcaaaggcagggaacctcatagtatcttatataatatacttcatttctctatctctatcacaatatccaacaagcttttcacagaattcatgcagtgcaaatccccaaaggtaacctttatccatttcatggtgagtgcgctttagaattttggcaaatcatactggtcacttatctcaactttgagatgtgtttgtccttgtagttaattgaaagaaatagggcactcttgtgagccactttagggttcactcctggcaataaagaatttacaaagagcaaaaaaaaaaaaaaaaaaaaaaaa

SEQ ID NO: 469 - DNA, 2229 bp, Homo sapiens
agctctttgtaaattctttattgccaggagtgaaccctaaagtggctcacaagagtgccctatttctttcaattaactacaaggacaaacacatctcaaagttgagataagtgaccagtatgatttgccaaaattctaaagcgcactcaccatgaaatggataaaggttacctttggggatttgcactgcatgaattctgtgaaaagcttgttggatattgtgatagagatagagaaatgaagtatattatataagatactatgaggttccctgcctttgcttcacatcccaggcttacaaacgtgccccataaacattccctctgtggctcttgcatttcatatatttatctaaactcttataatcaaatacacttttagtatttgctgtctcatgtgatgatgaatctcatatgtgtcccttctttgcatgaagtaagatagtcaacttattcaaaactttacatcattctagatttaagagacaaggaagagcttctcaggcagaaggaataatgtatgcctgacatgttcaaggaattacaagttagattttgtttaggtgcatgggaggggttgatggtgatgacagataaggctggagggatggggagaggctgtggctgtatacagcctcagtacaaggctaagcattttaactttatactggaaaaaaaatcaaacaaaggggagggataaaggacttagtcatctttgcactggaaaacaaaatatgtaattaaattcccatagctgcatgtaacattgaattcttccaggttaaaaaaaaagttaatcctgtgatattaatggaatgacattttgaggtcttgagaatgggcacaaaagtgggaaatgaatttcagtatgggcaaagacactgaggatgatgttgattagataattcactccgtaatgatcatgctgtgtgctagtaagtataaccctggaaagatcttgagatgcttcccagcctgttcacagatcccctgggccagaacactccttaggaaaaacagtcagctacatattaggcagcaacacgaagggtctttgaacaaaatgagtaatgttattctacagtgtagaaaggtcacagtacagatctgggaactaaatattaaaaatgagtgtggctggatatatggagaatgttgggcccagaaggaaccgtagagatcagatattacaacagctttgttttgagggttagaaatatgaaatgatttggttatgaacgcacagtttaggcagcagggccagaatcctgaccctctgccccgtggttatctcctccccagcttggctgcctcatgtcatcacagtattccattttgtttgttgcatgtcttgtgaagccatcaagattttctcgtctgttttcctctcattggtaatgctcactttgtgacttcatttcaaatctgtaatcccgttcaaataaatatccacaacaggatctgttttcctgcccatcctttaaggaacacatcaattcattttctaatgtccttccctcacaagcgggaccaggcacagggcgaggctcatcgatgacccaagatggcggccgggcatttctcccagggatctctgtgcttccttttgtgcttcctgtgtgtgtggatatttaaaggggctggaaatgtgcaaaaacatgtcactacttagacattatattgtcatcttgctgtttctagtgatgttaattatctccatttcagcagatgtgtggcctcagatggtaaagtcagcagcctttcttatttctcacctggaaatacatacgaccatttgaggagacaaatggcaaggtgtcagcataccctgaacttgagttgagagctacacacaatattattggtttccgagcatcacaaacaccctctctgtttcttcactgggcacagaattttaatacttatttcagtgggctgttggcaggaacaaatgaagcaatctacataaagtcactagtgcagtgcctgacacacaccattctcttgaggtcccctctagagatcccacaggtcatatgacttcttggggagcagtggctcacacctgtaatcccagcactttgggaggctgaggcaggtgggtcacctgaggtcaggagttcaagaccagcctggccaatatggtgaaaccccatctctactaaaaatacaaaaattagctgggcgtgctggtgcatgcctgtaatcccagccccaacacaatggaatt

SEQ ID NO: 470 - DNA, 2426 bp, Homo sapiens
gtaaattctttattgccaggagtgaaccctaaagtggctcacaagagtgccctatttctttcaattaactacaaggacaaacacatctcaaagttgagataagtgaccagtatgatttgccaaaattctaaagcgcactcaccatgaaatggataaaggttacctttggggatttgcactgcatgaattctgtgaaaagcttgttggatattgtgatagagatagagaaatgaagtatattatataagatactatgaggttccctgcctttgcttcacatcccaggcttacaaacgtgccccataaacattccctctgtggctcttgcatttcatatatttatctaaactcttataatcaaattacacttttagtatttgctgtctcatgtgatgatgaatctcatatgtgtcccttctttgcatgaagtaagatagtcaacttattcaaaactttacatcattctagatttaagagacaaggaagagcttctcaggcagaaggaataatgtatgcctgacatgttcaaggaattacaagttagattttgtttaggtgcatgggaggggttgatggtgatgacagataaggctggagggatggggagaggctgtggctgtatacagcctcagtacaaggctaagcattttaactttatactggaaaaaaaatcaaacaaaggggagggataaaggacttagtcatctttgcactggaaaacaaaatatgtaattaaattcccatagctgcatgtaacattgaattcttccaggttaaaaaaaaaagttaatcctgtgatattaatggaatgacattttgaggtcttgagaatgggcacaaaagtgggaaatgaatttcagtatgggcaaagacactgaggatgatgttgattagataattcactccgtaatgatcatgctgtgtgctagtaagtataaccctggaaagatcttgagatgcttcccagcctgttcacagatcccctgggccagaacactccttaggaaaaacagtcagctacatattaggcagcaacacgaagggtctttgaacaaaatgagtaatgttattctacagtgtagaaaggtcacagtacagatctgggaactaaatattaaaaatgagtgtggctggatatatggagaatgttgggcccagaaggaaccgtagagatcagatattacaacagctttgttttgagggttagaaatatgaaatgatttggttatgaacgcacagtttaggcagcagggccagaatcctgaccctctgccccgtggttatctcctccccagcttggctgcctcatgtcatcacagtattccattttgtttgttgcatgtcttgtgaagccatcaagattttctcgtctgttttcctctcattggtaatgctcactttgtgacttcatttcaaatctgtaatcccgttcaaataaatatccacaacaggatctgttttcctgcccatcctttaaggaacacatcaattcattttctaatgtccttccctcacaagcgggaccaggcacagggcgaggctcatcgatgacccaagatggcggccgggcatttctcccagggatctctgtgcttccttttgtgcttcctgtgtgtgtggatatttaaaggggctggaaatgtgcaaaaacatgtcactacttagacattatattgtcatcttgctgtttctagtgatgttaattatctccatttcagcagatgtgtggcctcagatggtaaagtcagcagcctttcttatttctcacctggaaatacatacgaccatttgaggagacaaatggcaaggtgtcagcataccctgaacttgagttgagagctacacacaatattattggtttccgagcatcacaaacaccctctctgtttcttcactgggcacagaattttaatacttatttcagtgggctgttggcaggaacaaatgaagcaatctacataaagtcactagtgcagtgcctgacacacaccattctcttgaggtcccctctagagatcccacaggtcatatgacttcttggggagcagtggctcacacctgtaatcccagcactttgggaggctgaggcaggtgggtcacctgaggtcaggagttcaagaccagcctggccaatatggtgaaaccccatctctactaaaaatacaaaaattagctgggcgtgctggtgcatgcctgtaatcccagctacttgggaggctgaggcaggagaattgctggaacatgggaggcggaggttgcagtgagctgtaattgtgccattgcactcgaacctgggcgacagagtggaactctgtttccaaaaaacaaacaaacaaaaaaggcatagtcagatacaacgtgggtgggatgtgtaaatagaagcaggatataaagggcatggggtgacggttttgcccaacacaatg

SEQ ID NO: 471 - DNA, 812 bp, Homo sapiens
gaacaaaatgagtaatgttattctacagtgtagaaaggtcacagtacagatctgggaactaaatattaaaaatgagtgtggctggatatatggagaatgttgggcccagaaggaaccgtagagatcagatattacaacagctttgttttgagggttagaaatatgaaatgatttggttatgaacgcacagtttaggcagcagggccagaatcctgaccctctgccccgtggttatctcctccccagcttggctgcctcatgtcatcacagtattccattttgtttgttgcatgtcttgtgaagccatcaagattttctcgtctgttttcctctcattggtaatgctcactttgtgacttcatttcaaatctgtaatcccgttcaaataaatatccacaacaggatctgttttcctgcccatcctttaaggaacacatcaattcattttctaatgtccttccctcacaagcgggaccaggcacagggcgaggctcatcgatgacccaagatggcggccgggcatttctcccagggatctctgtgcttccttttgtgcttcctgtgtgtgtggatatttaaaggggctggaaatgtgcaaaaacatgtcactacttagacattatattgtcatcttgctgtttctagtgatgttaattatctccatttcagcagatgtgtggcctcagatggtaaagtcagcagcctttcttatttctcacctctgtatcatcaggtccttcccaccatgcagatcttcctggtctccctcggctgcagccacacaaatctcccctctgtttttctgatgccag

SEQ ID NO: 472 - DNA, 515 bp, Homo sapiens
  misc_feature (1)...(515): n = A,T,C or G
acggagacttattttctgatattgtctgcatatgtatgtttttaagagtctggaaatagtcttatgactttcctatcatgcttattaataaataatacagcccagagaagatgaaaatgggttccagaattattggtccttgcagcccggtgaatctcagcaagaggaaccaccaactgacaatcaggatattgaacctggacaagagagagaaggaacacctccgatcgaagaacgtaaagtagaaggtgattgccaggaaatggatctggaaaagactcggagtgagcgtggagatggctctgatgtaaaagagaagactccacctaatcctaagcatgctaagactaaagaagcaggagatgggcagccataagttaaaaagaagacaagctgaagctacacacatggctgatgtcacattgaaaatgtgactgaaaatttgaaaattctctcaataaagtttgagttttctctgaagaaaaaaaaanaaaaaaaaaaaanaaaaanaaaaa

SEQ ID NO: 473 - DNA, 5829 bp, Homo sapiens
cgcatgccggggaagcccaagctggctcgaagagccaccagccacctgtgcaagggtgggcctggaccagttggaccagccaccaagctcacctactcaaggaagcagggatggccaggttgcaacagcctgagtggctgccacctgatagctgatggagcagaggcctgaggaaaatcagatggcacatttagctctttaatggatcttaagttaatttttctataaagcacatggcaccagtccatgcctcagagctcgtatggcactgcggaccacagcaggccgagttcccaggattgccatccaggggggccttctgtagccctggccagaccttgcagaggtggctgggtgctctttgagcgagctcggcctccctggcatgcacaggccccaggtactgacacgctgctctgagtgagcttgtcctgccttggctgccacctaactgctgatggagcagcggccttaggaaaagcaaatggcgctgtagcccaactttagggtagaagaagatgtaccatgtccggccgctagttggtgactggtgcacctgctcctggcgtacccttgcagaggtgggtggttgctctttggccagcttggccttgcctggcatgcacaagcctcagtgcaacaactgtcctacaaatggagacacagagaggaaacaagcagcgggctcaggagcagggtgtgtgctgcctttggggctccagtccatgcctcgggtcgtatggtactgcaggcttcttggttgccaagaggcggaccacaggccttcttgaggaggactttacgttcaagtgcagaaagcagccaaaattaccatccatgagactaagccttctgtggccctggcgagacttaaaatttgtgccaaggcaggacaagctcactcggagcagcgtgtcagtagctggggcctatgcatgccgggcagggccgggctggctgaaggagcaaccagccacctctgcaagggtgcgcctagtgcaggcggagcatccaccacctcacccgctcgaggaagtggggatggccaggttcccacagcctgagtgtctgccaccttattgctgatggagcagaggccttaagaaaagcagatggcactgtggccctacctttagggtggaagaagtgatgtacatgtccggacgctaattggtgactggtacaccggctcctgctacacctttgcagaggtggctggttgctctttgagccagcttgtccttgcccggcatgcacaagtttcagtgcaacaactttgccacaaatggagccatatagaggaaacaagaagcaggttcaggagaagggtgtaccctgcctttggggctccagtccatgcctcaggtgtcacatggcactgcgggcttcttggttgccaggaggcggaccacaggccatcttggggaggactttgtgttcaagtgcagaaagcagccaggattgccatccagggggaccttctatagccctggccaaaccttgcaggggtgtctggttgctctttgagccggcttggcctccctggcatgcacgggccccaggtgctggcacgctgctccgagtgtgcttgtcctgccttggctgccacctctgcgggggtgcgtctggagggggtggaccggccaccaaccttacccagtcaaggaagtggatggccatgttcccacagcctgagtggctgccacctgatggctgatggagcaaaggccttaggaaaagcagatggcccttggccctacctttttgttagaagaactgatgttccatgtcctgcagcgagtgaggttggtggctgtgcccccagctcctggcgcgccctcgcagaggtgactggttgctctttgggccctcttggccttgcccagcatgcacaagcctcagtgctactactgtgctacaaatggagccatataggggaaacgagcagccatctcaggagcaaggtgtatgctgcctttgggggctccagtccttgcctcaagggtcttatgtcactgtgggcttcttggttgtcaagaggcagaccataggccgtcttgagagggactttatgttcaagtgcagaaagcagccaggattgccaccctcgggactctgccttctgtggccctggccaaacttagaatttggccgtagacaggacaggctcacttggagtagcgtgtccgtagctggggtctgtgcatgccgggcaaggccgggctggctcggggagcaaccagccacctctgcgggggtgcgcctggagcaggtggagcagccaccagctcacccactccaggaagccggggtagccaggttcccaaggcctgagtgggtgccacctaatggctgaagaaacagaggccttgggaaaaccagatggcactgtggccctacctttatggtagaagagctgatttagcctgactggcagcgtgtggggttggtggctggtctgcctgctgctggcgcatccgtgcaaggatggctggttgccctttgagccagcttgcccttgcccggcatgcgcaagcctcagtgcaacaactgtgctgcaaatggggccatatagaggaaaggagcagctggctctggagcatggtgtgcactccctttgggccttcagtccatgtctcatgggtcgtatgacactgcgggcttgttggttgccaagaggcagaccacaggtcatcttgaggaggactttatgttccagtccagaaagcagccagtggtaccacccaggggacttgtgcttctgtgcccaggccagacgtagaatttgacaaagtcaggacggtctcagtcagagcggcgtgtcggtccccggggcctgtgcatgccgggcagggccgggctggcttggggagcaagcagccacctctgttaagggtgtgcctggagcaggtggagcagccaccaacctcacgcactgaaagaagcagggatggccaggttccaacatcctgagtggctgccacctgatggctgatggagcagaggcctgaggaaaagcagatggcactgctttgtagtgctgttctttgtctctcttgatctttttcagttaatgtctgttttatcagagactaggattgcaaaccctgctcttttttgctttccatttgcttggtaaatattcctccatccctttattttaagcctatgtgtgtctttgcacatgagatgggtctcctgaatacaggacaacaatgggtctttactctttatccaacttgccagtctgtgtcttttaactggggcatttagcccatttacatttaagtttagtattgttacatgtgaaatttatcctgtcatgatgttgctagctttttatttttcccattagtttgcagtttctttatagtgtcaatggtctttacaattcgatatgtttttgtagtggctggtactggtttttcctttctacgtttagtgtctccttcaggagctcttgtaacacaagaatgtggatttatttcttgtaaggtaaatatgtggatttatttcttgggactgtattctatggcctttaccccaagaatcattactttttaaaatgcaattcaaattagcataaaacatttacagcctatggaaaggcttgtggcattagaatccttatttataggattattttgtgtttttttgagatatggtctttgtcatcgaggcagaagtgccgtggtttgatcataattcaccacagccctgaactcttgagtccaagccatccttttgccttaatctcccaaccagttggatctgcaggcataaggcatcatgcgtggctaattttttcacgttttttttttttttttgtcgagattatggtgtcactgtgttgctctggctgatctcaaatgtttgacctcaagggatctttctgccacggcctcctaaagtgctaggattatatgcatgatacaccatgcctattgtagagtattacattattttcaaagtcttattgtaagagccatttattgcctttggcctaaataactcaatataatatctctgaaacttttttttgacaaattttggggcgtgatgatgagagaagggggtttgaaactttctaataagagttaacttagagccatttaagaaaggaaaaaacacaaattatcagaaaaacaacagtaagatcaagtgcaaaagttctgtggcaaagatgatgagagtaaagaatatatgtttgtgactcatggtggcttttactttgttcttgaatttctgagtacgggttaacatttaaagaatctacattatagataacattttattgcaagtaaatgtatttcaaaatttgttattggttttgtatgagattattctcagcctacttcattatcaagctatattattttattaatgtagttcgatgatcttacagcaaagctgaaagctgtatcttcaaaatatgtctatttgactaaaaagttattcaacaggagttattatctataaaaaaaatacaacaggaatataaaaaacttgaggataaaaagatgttggaaaaagtaatattaaatcttaaaaaacatatggaaactacacaatggtgaagacacattggtgaagtacaaaaatataaattggatctagaagaaagggcaatgcaggcaatagaaaaattagtagaaatccctttaaaggttagtttgtaaaatcaggtaagtttatttataatttgctttcatttatttcactgcaaattatattttggatatgtatatatattgtgcttcctctgcctgtcttacagcaatttgccttgcagagttctaggaaaaaggtggcatgtgtttttactttcaaaatatttaaatttccatcattataacaaaatcaatttttcagagtaatgattctcactgtggagtcatttgattattaagacccgttggcataagattacatcctctgactataaaaatcctggaagaaaacctaggaaatattcgtctggacattgcacttggcaatgaatttatgggtaaccactgatccacttccagtcactatccatgagtttttatttccagatacatgaaatcatatgagttgaaactttcttttgattgagcagtttggaaaccgtctttttgtagaatctgcaagtggatatttggaaccctttgaggcctatgctgaaaaaagaaatatcttcactacatgatgaccaccagcagcagctggggaaaccagcaccctgtggaattccatacggtgcatagaatacatcctcccttcagtcggcttgggtcaacttaggtcatgggccacctggctgatagcagtttccacagaaatgcttcaagatgaaagtggatgaccgggccaccctccaccactgccctgtaagaccatgggacacacaggccaccagttcttttcatgtggtcatcccctgttagatgggagaaaatacacctgcctcatttttgtaccttctgtgtgaacattccacggcagactgtcgctaaatgtggatgaagaattgaatgaatgaatgaatatgagagaaaatgaataaatggttcagatcctgggctggaaggctgtgtatgaggatggtgggtagaggagggtctgtttttcttgcctttaagtcactaattgtcactttggggcaggagcacaggctttgaatgcagaccgactggactttaattctggctttactagttgtgattgtgtgaccttgtgaaagttacttaaaccctctgtgcctgtttctttatctgtaaaatggagataataagatgtcaaaggactgtggtaagaattaaatgctttaaaaaaaaaaaaaaaaaa

SEQ ID NO: 474 - DNA, 1594 bp, Homo sapiens
atttatggatcattaatgcctctttagtagtttagagaaaacgtcaaaagaaatggccccagaataagcttcttgatttgtaaaattctatgtcattggctcaaatttgtatagtatctcaaaatataaatatatagacatctcagataatatatttgaaatagcaaattcctgttagaaaataatagtacttaactagatgagaataacaggtcgccattatttgaattgtctcctattcgtttttcatttgttgtgttactcatgttttacttatgagggatatatataacttccactgttttcagaattattgtatgcagtcagtatgagaatgcaatttaagtttccttgatgctttttcacacttctattactagaaataagaatacagtaatattggcaaagaaaattgaccagttcaataaaattttttagtaaatctgattgaaaataaacattgcttatggctttcttacatcaatattgttatgtcctagacaccttatctgaaattacggcttcaaaattctaattatgtgcaaatgtgtaaaatatcaatactttatgttcaagctggggcctcttcaggcgtcctgggctgagagagaaagatgctagctccgcaagccggagagggaacaccgccacattgttacacggacacaccgccacgtggacacatgaccagactcacatgtacagacacacggagacattaccacatggagacaccgtcacacagtcacacggacacactggcatagtcacatggacggacacacagacatatggagaaatcacatggacacaccaccacactatcacagggacacagacacacggagacatcaccacatggacacactgtcacactaccacagggacacgagacatcacactgtcacatggacacaccatcacacacatgaacacaccgacacactgccatatggacactggcacacacactgccacactgtcacatggacacacctccacaccatcacaccaccacacacactgcctgtggacacaaggacacacagacactgtcacacagatacacaaaacactgtcacacggagacatcaccatgcagatacaccaccactctggtgccgtctgaattaccctgctggggggacagcagtggcatactcatgcctaagtgactggctttcaccccagtagtgattgccctccatcaacactgcccaccccaggttggggctaccccagcccatctttacaaaacagggcaaggtgaactaatggagtgggtggaggagttggaagaaatcccagcgtcagtcaccgggatagaattcccaaggaaccctctttttggaggatggtttccatttctggaggcgatctgccgacagggtgaatgccttcttgcttgtcttctggggaatcagagagagtccgttttgtggtgggaagagtgtggctgtgtactttgaactcctgtaaattctctgactcatgtccacaaaaccaacagttttgtgaatgtgtctggaggcaagggaagggccactcaggatctatgttgaagggaagaggcctggggctggagtattcgctt

SEQ ID NO: 475 - DNA, 2414 bp, Homo sapiens
  unsure (33): n=A,T,C or G
cccaacacaatggctttataagaatgcttcacntgtgaaaaacaaatatcaaagtcttcttgtagattatttttaaggacaaatctttattccatgtttaatttatttagctttccctgtagctaatatttcatgctgaacacattttaaatgctgtaaatgtagataatgtaatttatgtatcattaatgcctctttagtagtttagagaaaacgtcaaaagaaatggccccagaataagcttcttgatttgtaaaattctatgtcattggctcaaatttgtatagtatctcaaaatataaatatatagacatctcagataatatatttgaaatagcaaattcctgttagaaaataatagtacttaactagatgagaataacaggtcgccattatttgaattgtctcctattcgtttttcatttgttgtgttactcatgttttacttatggggggatatatataacttccgctgttttcagaagtattgtatgcagtcagtatgagaatgcaatttaagtttccttgatgctttttcacacttctattactagaaataagaatacagtaatattggcaaagaaaattgaccagttcaataaaattttttagtaaatctgattgaaaataaacattgcttatggctttcttacatcaatattgttatgtcctagacaccttatctgaaattacggcttcaaaattctaattatgtgcaaatgtgtaaaatatcaatactttatgttcaagctggggcctcttcaggcgtcctgggctgagagagaaagatgctagctccgcaagccggggagggaacaccgccacattgttacatggacacaccgccacgtggacacatgaccagactcacatgtacagacacacggagacattaccacatggagacaccgtcacacagtcacacgagcacactggcatagtcacatggacggacacacagacatatggagaaatcacactgacacaccaccacactatcacagggacacagacacacggagacatcaccacatggacacactgtcacactaccacagggacacgagacatcacactgtcacatggacacaccatcacacacatgaacacaccgacacactgccatatggacactgccacacacactgccacactgtcacatggacacacctccataccatcacaccaccacacacactgccatgtggacacaaggacacacagacactgtcacacagatacacaaaacactgtcacacggagacatcaccatgcagatacaccaccacatggacatagcaccagacactctgccacacagatacaccaccacacagaaatgcggacacactgccacacagacaccaccacatcgttgccacactttcatgtgtcagctggcggtgtgggccccacgactctgggctctaatcgagaaattacttggacatatagtgaaggcaaaatttttttttattttctgggtaaccaagcgcgactctgtctcaaaaaaagaaaaaaaaagcaatatactgtgtaatcgttgacagcataattcactattatgtagatcggagagcagaggattctgaatgcatgaacatatcattaacatttcaatacattactcataattactgatgaactaaagagaaaccaagaaattatggtgatagttatattgacctggagaaatgtagacacaaaagaaccgtaagatgagaaatgtgttaacacagtctataagggcatgcaagaataaaaataggggagaaaacaggagagtttttcaagagctttctggtcatgtaagtcaacttgtatcggttaatttttaaaaggtttatttacatgcaataaactgcacatacttcaattgtacattttggtaattcttggcatttgtagctctataaaaccagcaacatattaaaatagcaaacatatccattacctttaccaccaaagttttcttgtgttttttctactcactttttcctgcctatccccccatctcttccacaggtaaccactgatccacttccagtcactatccatgagtttttatttccaaatacatgaaatcatatgaatttctggtttttcctgttggagcccaaggagcaagggcagaatgaggaacatgatgtttcttwccgacagttactcatgacgtctccatccaggactgaggggggcatccttctccatctaggactgggggcatccttctccatccagtattgggggtcatccttctccatccagtattgggggtcatcctcctccatccaggacctgaggggtgtccttttctgcgcttccttggatggcagtctttcccttcatgtttatagtracttaccattaaatcactgtgccgttttttcctaaaataaaaaaaaaaaaaaaaa

SEQ ID NO: 476 - DNA, 3434 bp, Homo sapiens
ctgtgctgcaaatggggccatatagaggaaaggagcagctggctctggagcatggtgtgcactccctttgggccttcagtccatgtctcatgggtcgtatgacactgcgggcttgttggttgccaagaggcagaccacaggtcatcttgaggaggactttatgttccagtccagaaagcagccagtggtaccacccaggggacttgtgcttctgtggcccaggccagacgtagaatttgacaaagtcaggacggtctcagtcagagcagcatgtcggtccccggggcctgtgcatgccgggcagggccaggctggcttaaggagcaagcagccacctctgttaggggtgtgcctggagcaggtggagcagccaccaacctcacgcactgaaagaagcagggatggccaggttccaacatcctgagtggctgccacctgatggctgatggagcagaggcctgaggaaaagcagatggcactgctttgtagtgctgttctttgtctctcttgatctttttcagttaatgtctgttttatcagagactaggattgcaaaccctgctcttttttgctttccatttgcttggtaaatattcctccatccctttattttaagcctatgtgtgtctttgcacatgagatgggtctcctgaatacaggacaacaatgggtctttactctttatccaacttgccagtctgtgtcttttaactggggcatttagcccatttacatttaagtttagtatttgttacatgtgaaatttatcctgtcatgatgttgctagctttttatttttcccattagtttgcagtttctttatagtgtcaatggtctttacaattcgatatgtttttgtagtggctggtactggtttttcctttctacgtttagtgtctccttcaggagctcttgtaacacaagaatgtggatttatttcttgtaaggtaaatatgtggatttattctgggactgtattctatggcctttaccccaagaatcattactttttaaaatgcaattcaaattagcataaaacatttacagcctatggaaaggcttgtggcattagaatccttatttataggattattttgtgtttttttgagatatggtctttgtcatcgaggcagaagtgccgtggtttgatcataattcaccacagccctgaactcttgagtccaagccatccttttgccttaatctcccaaccagttggatctacaagcataaggcatcatgcgtggctaattttttcacgttttttttttttttgtcgagattatggtatcactgtgttgctctggctgatctcaaatgtttgacctcaagggatctttctgccacagcctcctaaagtgctaggattatatgcatgatacaccatgcctattgtagagtattacattattttcaaagtcttattgtaagagccatttattgcctttggcctaaataactcaatataatatctctgaaacttttttttgacaaattttggggcgtgatgatgagagaagggggtttgaaactttctaataagagttaacttagagccatttaagaaaggaaaaaacacaaattatcagaaaaacaacagtaagatcaagtgcaaaagttctgtggcaaagatgatgagagtaaagaatatatgtttgtgactcatggtggcttttactttgttcttgaatttctgagtacgggttaacatttaaagaatctacattatagataacattttattgcaagtaaatgtatttcaaaatttgttattggttttgtatgagattattctcagcctacttcattatcaagctatattattttattaatgtagttcgatgatcttacagcaaagctgaaagctgtatcttcaaaatatgtctatttgactaaaaagttattcaacaggagttattatctataaaaaaatacaacaggaatataaaaaacttgaggataaaaagatgttggaaaaagtaatattaaatcttaaaaaacatatggaaactacacaatggtgaagacacattggtgaagtacaaaaatataaattggatctagaagaaagggcaatgcaggcaatagaaaaattagtagaaatccctttaaaggttagtttgtaaaatcaggtaagtttatttataatttgctttcatttatttcactgcaaattatattttggatatgtatatatattgtgcttcctctgcctgtcttacagcaatttgccttgcagagttctaggaaaaaggtggcatgtgtttttactttcaaaatatttaaatttccatcattataacaaaatcaatttttcagagtaatgattctcactgtggagtcatttgattattaagacccgttggcataagattacatcctctgactataaaaatcctggaagaaaacctaggaaatattcgtctggacattgcacttggcaatgaatttatgggcgctttggaatcctgcagatataataatgataattaaacaaaacactcagagaaactgccaaccctaggatgaagtatattgttactgtgctttgggattaaaataagtaactacagtttatagaacttttatactgatacacagacactaaaaagggaaagggtttagatgagaagctctgctatgcaatcaagaatctcagccactcatttctgtaggggctgcaggagctccctgtaaagagaggttatggagtctgtagcttcaggtaagatacttaaaacccttcagagtttctccattttttcccatagtttccccaaaaaggttatgacactttataagaatgcttcacttgtgaaaaacaaatatcaaagtcttcttgtagattatttttaaggacaaatctttattccatgtttaatttatttagctttccctgtagctaatatttcatgctgaacacattttaaatgctgtaaatgtagataatgtaatttatgtatcattaatgcctctttagtagtttagagaaaacgtcaaaagaaatggccccagaataagcttcttgatttgtaaaattctatgtcattggctcaaatttgtatagtatctcaaaatataaatatatagacatctcagataatatatttgaaatagcaaattcctgttagaaaataatagtacttaactagatgagaataacaggtcgccattatttgaattgtctcctattcgtttttcatttgttgtgttactcatgttttacttatggggggatatatataacttccgctgttttcagaagtattgtatgcagtcagtatgagaatgcaatttaagtttccttgatgctttttcacacttctattactagaaataagaatacagtaatattggcaaagaaaattgaccagttcaataaaattttttagtaaatctgattgaaaataaaaaaaaaaaaaaaaaaaaaaaaa

SEQ ID NO: 477 - protein, 140 aa, Homo sapiens
MDGHTDIWRNHMDTPPHYHRDTDTRRHHHMDTLSHYHRDTRHHTVTWTHHHTHEHTDTLPYGHWHTHCHTVTWTHLHTITPPHTLPVDTRTHRHCHTDTQNTVTRRHHHADTPPLWCRLNYPAGGTAVAYSCLSDWLSPQ

SEQ ID NO: 478 - protein, 143 aa, Homo sapiens
MYRHTETLPHGDTVTQSHGHTGIVTWTDTQTYGEITWTHHHTITGTQTHGDITTWTHCHTTTGTRDITLSHGHTITHMNTPTHCHMDTGTHTATLSHGHTSTPSHHHTHCLWTQGHTDTVTQIHKTLSHGDITMQIHHHSGAV

SEQ ID NO: 479 - protein, 222 aa, Homo sapiens
MYRHTETLPHGDTVTQSHEHTGIVTWTDTQTYGEITLTHHHTITGTQTHGDITTWTHCHTTTGTRDITLSHGHTITHMNTPTHCHMDTATHTATLSHGHTSIPSHHHTHCHVDTRTHRHCHTDTQNTVTRRHHHADTPPHGHSTRHSATQIHHHTEMRTHCHTDTTTSLPHFHVSAGGVGPTTLGSNREITWTYSEGKIFFYFLGNQARLCLKKRKKKQYTV

SEQ ID NO: 480 - protein, 144 aa, Homo sapiens [sequence omitted]

SEQ ID NO: 481 - protein, 167 aa, Homo sapiens
MHGPQVLARCSECACPALAATSAGVRLEGVDRPPTLPSQGSGWPCSHSLSGCHLMADGAKALGKADGPWPYLFVRRTDVPCPAASEVGGCAPSSWRALAEVTGCSLGPLGLAQHAQASVLLLCYKWSHIGETSSHLRSKVYAAFGGSSPCLKGLMSLWASWLSRGRP

SEQ ID NO: 482 - protein, 143 aa, Homo sapiens [sequence omitted]

SEQ ID NO: 483 - protein, 143 aa, Homo sapiens
METQRGNKQRAQEQGVCCLWGSSPCLGSYGTAGFLVAKRRTTGLLEEDFTFKCRKQPKLPSMRLSLLWPWRDLKFVPRQDKLTRSSVSVAGAYACRAGPGWLKEQPATSARVRLVQAEHPPPHPLEEVGMARFPQPECLPPYC

SEQ ID NO: 484 - protein, 30 aa, Homo Sapien
TAASDNFQLSQGGQGFAIPIGQAMAIAGQI

SEQ ID NO: 485 - DNA, 31 bp, Artificial Sequence
  Made in a lab
gggaagcttatcacctatgtgccgcctctgc

SEQ ID NO: 486 - DNA, 27 bp, Artificial Sequence
  Made in a lab
gcgaattctcacgctgagtatttggcc

SEQ ID NO: 487 - DNA, 36 bp, Artificial Sequence
  Made in a lab
cccgaattcttagctgcccatccgaacgccttcatc

SEQ ID NO: 488 - DNA, 33 bp, Artificial Sequence
  Made in a lab
gggaagcttcttccccggctgcaccagctgtgc

SEQ ID NO: 489 - protein, 19 aa, Artificial Sequence
  Made in a lab
MDRLVQRFGTRAVYLASVA

SEQ ID NO: 490 - protein, 20 aa, Artificial Sequence
  Made in a lab
YLASVAAFPVAAGATCLSHS

SEQ ID NO: 491 - protein, 20 aa, Artificial Sequence
  Made in a lab
TCLSHSVAVVTASAALTGFT

SEQ ID NO: 492 - protein, 20 aa, Artificial Sequence
  Made in a lab
ALTGFTFSALQILPYTLASL

SEQ ID NO: 493 - protein, 20 aa, Artificial Sequence
  Made in a lab
YTLASLYHREKQVFLPKYRG

SEQ ID NO: 494 - protein, 20 aa, Artificial Sequence
  Made in a lab
LPKYRGDTGGASSEDSLMIS

SEQ ID NO: 495 - protein, 20 aa, Artificial Sequence
  Made in a lab
DSLMTSFLPGPKPGAPFPNG

SEQ ID NO: 496 - protein, 21 aa, Artificial Sequence
  Made in a lab
APFPNGHVGAGGSGLLPPPPA

SEQ ID NO: 497 - protein, 20 aa, Artificial Sequence
  Made in a lab
LLPPPPALCGASACDVSVRV

SEQ ID NO: 498 - protein, 20 aa, Artificial Sequence
  Made in a lab
DVSVRVVVGEPTEARVVPGR

SEQ ID NO: 499 - protein, 20 aa, Artificial Sequence
  Made in a lab
RVVPGRGICLDLAILDSAFL

SEQ ID NO: 500 - protein, 20 aa, Artificial Sequence
  Made in a lab
LDSAFLLSQVAPSLFMGSIV

SEQ ID NO: 501 - protein, 20 aa, Artificial Sequence
  Made in a lab
FMGSIVQLSQSVTAYMVSAA

SEQ ID NO: 502 - DNA, 414 bp, Homo Sapien
  misc_feature (1)...(414): n=A,T,C or G
caccatggagacaggcctgcgctggcttttcctggtcgctgtgctcaaaggtgtccaatgtcagtcggtggaggagtccgggggtcgcctggtcacgcctgggacacctttgacantcacctgtagagtttttggaatngacctcagtagcaatgcaatgagctgggtccgccaggctccagggaaggggctggaatggatcggagccattgataattgtccacantacgcgacctgggcgaaaggccgattnatnatttccaaaacctngaccacggtggatttgaaaatgaccagtccgacaaccgaggacacggccacctatttttgtggcagaatgaatactggtaatagtggttggaagaatatttggggcccaggcaccctggtcaccgtntcctcagggcaacctaa

SEQ ID NO: 503 - DNA, 379 bp, Homo Sapien
  misc_feature (1)...(379): n=A,T,C or G
atncgatggtgcttggtcaaaggtgtccagtgtcagtcggtggaggagtccgggggtcgcctggtcacgcctgggacacccctgacactcacctgcaccgtntctggattngacatcagtagctatggagtgagctgggtccgccaggctccagggaaggggctggnatacatcggatcattagtagtagtggtacattttacgcgagctgggcgaaaggccgattcaccatttccaaaacctngaccacggtggatttgaaaatcaccagtttgacaaccgaggacacggccacctatttntgtgccagaggggggtttaattataaagacatttggggcccaggcaccctggtcaccgtntccttagggcaacctaa

SEQ ID NO: 504 - protein, 19 aa, Artificial Sequence
  Made in a lab
GFTNYTDFEDSPYFKENSA

SEQ ID NO: 505 - protein, 20 aa, Artificial Sequence
  Made in a lab
KENSAFPPFCCNDNVTNTAN

SEQ ID NO: 506 - DNA, 407 bp, Homo Sapien
atggagacaggcctgcgctggcttctcctggtcgctgcgctcaaaggtgtccagtgtcagtcgctggaggagtccgggggtcgcctggtcacgcctgggacacccctgacactcacctgcaccgtctctggattctccctcagtagcaatgcaatgatctgggtccgccaggctccagggaaggggctggaatacatcggatacattagttatggtggtagcgcatactacgcgagctgggtgaaaggccgattcaccatctccaaaacctcgaccacggtggatctgagaatgaccagtctgacaaccgaggacacggccacctatttctgtgccagaaatagtgattttagtggtatgttgtggggcccaggcaccctggtcaccgtctcctcagggcaacctaa

SEQ ID NO: 507 - DNA, 422 bp, Homo Sapien
atggagacaggcctgcgctggcttctcctggtcgctgtgctcaaaggtgtccagtgtcagtcggtggaggagtccgggggtcgcctggtcacgcctgggacacccctgacactcacctgtacagtctctggattctccctcagcaactacgacctgaactgggtccgccaggctccagggaaggggctggaatggatcgggatcattaattatgttggtaggacggactacgcgaactgggcaaaaggccggttcaccatctccaaaacctcgaccaccgtggatctcaagatcgccagtccgacaaccgaggacacggccacctatttctgtgccagagggtggaagtgcgatgagtctggtccgtgcttgcgcatctggggcccaggcaccctggtcaccgtctccttagggcaacctaa

SEQ ID NO: 508 - DNA, 411 bp, Homo Sapien
  misc_feature (1)...(411): n=A,T,C or G
atggagacaggcctcgctggcttctcctggtcgctgtgctcaaaggtgtccagtgtcagtcggtggaggagtccgggggtcgcctggtcacgcctgggacacccctgacactcacctgcacagtctctggaatcgacctcagtagctactgcatgagctgggtccgccaggctccagggaaggggctggaatggatcggaatcattggtactcctggtgacacatactacgcgaggtgggcgaaaggccgattcaccatctccaaaacctcgaccacggtgcatntgaaaatcnccagtccgacaaccgaggacacggccacctatttctgtgccagagatcttcgggatggtagtagtactggttattataaaatctggggcccaggcaccctggtcaccgtctccttgg

SEQ ID NO: 509 - protein, 15 aa, Artificial Sequence
  Made in a lab
LCKFTEWIEKTVQAS

SEQ ID NO: 510 - protein, 15 aa, Artificial Sequence
  Made in a lab
PEYNRPLLANDLMLI

SEQ ID NO: 511 - protein, 15 aa, Artificial Sequence
  Made in a lab
YHPSMFCAGGGQDQK

SEQ ID NO: 512 - protein, 15 aa, Artificial Sequence
  Made in a lab
DSGGPLICNGYLQGL

SEQ ID NO: 513 - protein, 15 aa, Artificial Sequence
  Made in a lab
APCGQVGVPBVYTNL

SEQ ID NO: 514 - protein, 15 aa, Artificial Sequence
  Made in a lab
LCKFTEWIEKTVQAS

SEQ ID NO: 515 - protein, 15 aa, Artificial Sequence
  Made in a lab
MVEASLSVRHPEYNR

SEQ ID NO: 516 - protein, 15 aa, Artificial Sequence
  Made in a lab
VSESDTIRSISIASQ

SEQ ID NO: 517 - protein, 15 aa, Artificial Sequence
  Made in a lab
EVCSKLYDPLYHPSM

SEQ ID NO: 518 - protein, 15 aa, Artificial Sequence
  Made in a lab
RAEPGTEARRHYDEG

SEQ ID NO: 519 - protein, 17 aa, Artificial Sequence
  Made in a lab
RAEPGTEARRNYDEGCG

SEQ ID NO: 520 - protein, 25 aa, Artificial Sequence
  Made in a lab
VGEGLYQGVPRAEPGTEARRHYDEG

SEQ ID NO: 521 - protein, 21 aa, Artificial Sequence
  Made in a lab
APFPNGHVGAGGSGLLPPPPA

SEQ ID NO: 522 - protein, 20 aa, Artificial Sequence
  Made in a lab
LLVVPAIKKDYGSQEDFTQV

SEQ ID NO: 523 - protein, 254 aa, Artificial Sequence
  Made in a lab
  VARIANT (1)...(254): Xaa = any amino acid
MATAGNPWGWFLGYLILGVAGSLVSGSCSQIINGEDCSPHSQPWQAALVMENELFCSGVLVHPQWVLSATHCFQNSYTIGLGLHSLEADQEPGSQMVEASLSVRHPEYNRPLLANDLMLIKLDESVSESDTIRSISIASQCPTAGNSCLVSGWGLLANGRMPTVLQCVNVSVVSEEVCSKLYDPLYHPSMFCAGGGQXQXDSCNGDSGGPLICNGYLQGLVSFGKAPCGQVGVPGVYTNLCKFTEWIEKTVQAS

SEQ ID NO: 524 - DNA, 765 bp, Homo sapien
atggccacagcaggaaatccctggggctggttcctggggtacctcatccttggtgtcgcaggatcgctcgtctctggtagctgcagccaaatcataaacggcgaggactgcagcccgcactcgcagccctggcaggcggcactggtcatggaaaacgaattgttctgctcgggcgtcctggtgcatccgcagtgggtgctgtcagccgcacactgtttccagaactcctacaccatcgggctgggcctgcacagtcttgaggccgaccaagagccagggagccagatggtggaggccagcctctccgtacggcacccagagtacaacagacccttgctcgctaacgacctcatgctcatcaagttggacgaatccgtgtccgagtctgacaccatccggagcatcagcattgcttcgcagtgccctaccgcggggaactcttgcctcgtttctggctggggtctgctggcgaacggcagaatgcctaccgtgctgcagtgcgtgaacgtgtcggtggtgtctgaggaggtctgcagtaagctctatgacccgctgtaccaccccagcatgttctgcgccggcggagggcaagaccagaaggactcctgcaacggtgactctggggggcccctgatctgcaacgggtacttgcagggccttgtgtctttcggaaaagccccgtgtggccaagttggcgtgccaggtgtctacaccaacctctgcaaattcactgagtggatagagaaaaccgtccaggccagttaa

SEQ ID NO: 525 - protein, 254 aa, Homo sapien
MATAGNPWGWFLGYLILGVAGSLVSGSCSQIINGEDCSPHSQPWQAALVMENELFCSGVLVHPQWVLSAAHCFQNSYTIGLGLHSLEADQEPGSQMVEASLSVRHPEYNRPLLANDLMLIKLDESVSESDTIRSISIASQCPTAGNSCLVSGWGLLANGRMPTVLQCVNVSVVSEEVCSKLYDPLYHPSMFCAGGGQDQKDSCNGDSGGPLICNGYLQGLVSFGKAPCGQVGVPGVYTNLCKFTEWIEKTVQAS

SEQ ID NO: 526 - DNA, 963 bp, Homo sapiens
atgagttcctgcaacttcacacatgccacctttgtgcttattggtatcccaggattagagaaagcccatttctgggttggcttccccctcctttccatgtatgtagtggcaatgtttggaaactgcatcgtggtcttcatcgtaaggacggaacgcagcctgcacgctccgatgtacctctttctctgcatgcttgcagccattgacctggccttatccacatccaccatgcctaagatccttgcccttttctggtttgattcccgagagattagctttgaggcctgtcttacccagatgttctttattcatgccctctcagccattgaatccaccatcctgctggccatggcctttgaccgttatgtggccatctgccacccactgcgccatgctgcagtgctcaacaatacagtaacagcccagattggcatcgtggctgtggtccgcggatccctcttttttttcccactgcctctgctgatcaagcggctggccttctgccactccaatgtcctctcgcactcctattgtgtccaccaggatgtaatgaagttggcctatgcagacactttgcccaatgtggtatatggtcttactgccattctgctggtcatgggcgtggacgtaatgttcatctccttgtcctattttctgataatacgaacggttctgcaactgccttccaagtcagagcgggccaaggcctttggaacctgtgtgtcacacattggtgtggtactcgccttctatgtgccacttattggcctctcagttgtacaccgctttggaaacagccttcatcccattgtgcgtgttgtcatgggtgacatctacctgctgctgcctcctgtcatcaatcccatcatctatggtgccaaaaccaaacagatcagaacacgggtgctggctatgttcaagatcagctgtgacaaggacttgcaggctgtgggaggcaagtga

SEQ ID NO: 527 - protein, 320 aa, Homo sapiens
MSSCNFTHATFVLIGIPGLEKAHFWVGFPLLSMYVVAMFGNCIVVFIVRTERSLHAPMYLFLCMLAAIDLALSTSTMPKILALFWFDSREISFEACLTQMFFIHALSAIESTILLAMAFDRYVAICHPLRHAAVLNNTVTAQIGIVAVVRGSLFFFPLPLLIKRLAFCHSNVLSHSYCVHQDVMKLAYADTLPNVVYGLTAILLVMGVDVMFISLSYFLIIRTVLQLPSKSERAKAFGTCVSHIGVVLAFYVPLIGLSVVHRFGNSLHPIVRVVMGDIYLLLPPVINPIIYGAKTKQIRTRVLAMFKISCDKDLQAVGGK

SEQ ID NO: 528 - DNA, 20 bp, Homo Sapien
actatggtccagaggctgtg

SEQ ID NO: 529 - DNA, 20 bp, Homo Sapien
atcacctatgtgccgcctct

SEQ ID NO: 530 - DNA, 1852 bp, Homo sapiens
ggcacgagaattaaaaccctcagcaaaacaggcatagaagggacataccttaaagtaataaaaaccacctatgacaagcccacagccaacataatactaaatggggaaaagttagaagcatttcctctgagaactgcaacaataaatacaaggatgctggattttgtcaaatgccttttctgtgtctgttgagatgcttatgtgactttgcttttaattctgtttatgtgattatcacatttattgacttgcctgtgttagaccggaagagctggggtgtttctcaggagccaccgtgtgctgcggcagcttcgggataacttgaggctgcatcactggggaagaaacacaytcctgtccgtggcgctgatggctgaggacagagcttcagtgtggcttctctgcgactggcttcttcggggagttcttccttcatagttcatccatatggctccagaggaaaattatattattttgttatggatgaagagtattacgttgtgcagatatactgcagtgtcttcatctcttgatgtgtgattgggtaggttccaccatgttgccgcagatgacatgatttcagtacctgtgtctggctgaaaagtgtttgtttgtgaatggatattgtggtttctggatctcatcctctgtgggtggacagctttctccaccttgctggaagtgacctgctgtccagaagtttgatggctgaggagtataccatcgtgcatgcatctttcatttcctgcatttcttcctccctggatggacagggggagcggcaagagcaacgtgggcacttctggagaccacaacgactcctctgtgaagacgcttgggagcaagaggtgcaagtggtgctgccactgcttcccctgctgcagggggagcggcaagagcaacgtggtcgcttggggagactacgatgacagcgccttcatggatcccaggtaccacgtccatggagaagatctggacaagctccacagagctgcctggtggggtaaagtccccagaaaggatctcatcgtcatgctcagggacacggatgtgaacaagagggacaagcaaaagaggactgctctacatctggcctctgccaatgggaattcagaagtagtaaaactcgtgctggacagacgatgtcaacttaatgtccttgacaacaaaaagaggacagctctgacaaaggccgtacaatgccaggaagatgaatgtgcgttaatgttgctggaacatggcactgatccaaatattccagatgagtatggaaataccactctacactatgctgtctacaatgaagataaattaatggccaaagcactgctcttatacggtgctgatatcgaatcaaaaaacaagcatggcctcacaccactgctacttggtatacatgagcaaaaacagcaagtggtgaaatttttaatcaagaaaaaagcgaatttaaatgcgctggatagatatggaagaactgctctcatacttgctgtatgttgtggatcagcaagtatagtcagccctctacttgagcaaaatgttgatgtatcttctcaagatctggaaagacggccagagagtatgctgtttctagtcatcatcatgtaatttgccagttactttctgactacaaagaaaaacagatgttaaaaatctcttctgaaaacagcaatccagaacaagacttaaagctgacatcagaggaagagtcacaaaggcttaaaggaagtgaaaacagccagccagagctagaagatttatggctattgaagaagaatgaagaacacggaagtactcatgtgggattcccagaaaacctgactaacggtgccgctgctggcaatggtgatga

SEQ ID NO: 531 - DNA, 879 bp, Homo sapiens
atgcatctttcatttcctgcatttcttcctccctggatggacagggggagcggcaagagcaacgtgggcacttctggagaccacaacgactcctctgtgaagacgcttgggagcaagaggtgcaagtggtgctgccactgcttcccctgctgcagggggagcggcaagagcaacgtggtcgcttggggagactacgatgacagcgccttcatggatcccaggtaccacgtccatggagaagatctggacaagctccacagagctgcctggtggggtaaagtccccagaaaggatctcatcgtcatgctcagggacacggatgtgaacaagagggacaagcaaaagaggactgctctacatctggcctctgccaatgggaattcagaagtagtaaaactcgtgctggacagacgatgtcaacttaatgtccttgacaacaaaaagaggacagctctgacaaaggccgtacaatgccaggaagatgaatgtgcgttaatgttgctggaacatggcactgatccaaatattccagatgagtatggaaataccactctacactatgctgtctacaatgaagataaattaatggccaaagcactgctcttatacggtgctgatatcgaatcaaaaaacaagcatggcctcacaccactgctacttggtatacatgagcaaaaacagcaagtggtgaaatttttaatcaagaaaaaagcgaatttaaatgcgctggatagatatggaagaactgctctcatacttgctgtatgttgtggatcagcaagtatagtcagccctctacttgagcaaaatgttgatgtatcttctcaagatctggaaagacggccagagagtatgctgtttctagtcatcatcatgtaa

SEQ ID NO: 532 - protein, 292 aa, Homo sapiens
MHLSFPAFLPPWMDRGSGKSNVGTSGDHNDSSVKTLGSKRCKWCCHCFPCCRGSGKSNVVAWGDYDDSAFMDPRYHVHGEDLDKLHRAAWWGKVPRKDLIVMLRDTDVNKRDKQKRTALHLASANGNSEVVKLVLDRRCQLNVLDNKKRTALTKAVQCQEDECALMLLEHGTDPNIPDEYGNTTLHYAVYNEDKLMAKALLLYGADIESKNKHGLTPLLLGIHEQKQQVVKFLIKKKANLNALDRYGRTALILAVCCGSASIVSPLLEQNVDVSSQDLERRPESMLFLVIIM

SEQ ID NO: 533 - DNA, 801 bp, Homo sapiens
atgtacaagcttcagtgcaacaactgtgctacaaatggagccacagagaggaaacaagcagcaggctcaggagcagggtatgcgctgccttcggctctccaatccatgcctcagggctcctatgccactgcacgattcttggttgccaagaggccaaccacaggccatcttgagaaggagtttatgttccactgcagaaagcagccaggatcaccatccaggggacttggtcttctgtggccctggccagacatagaatttgtgccaaggcaggacaagctcactcagagcagcgtgttagtacctcaaatctgtgcgtgccagacaaggccaaactggctcaatgagcaaccagccacctctgcaggggtgcgtctggaggaggtggaccagccaccaaccttacccagtcaaggaagtggatggccatgttcccacagcctgagtggctgccacctgatggctgatatagcaaaggccttaggaaaagcagatggcccttggccctacctttttgttagaagaactgatgttccatgtcctgcagcgagtgaggttggtggctgtgcccccagctcctggcacaccctcgcagaggtgactggttgctctttgagccctcttagccttgcccagcatgcacaagcctcagtgctactactgtgctacaaatggagccatataggggaaacgagcagccatctcaggagcaaggtgtatgctgcctttgggggctccagtccttgcctcaagggtcttatgtcactgtgggcttcttggttgccaagaggcagaccatag

SEQ ID NO: 534 - protein, 266 aa, Homo sapiens [sequence omitted]

SEQ ID NO: 535 - DNA, 6082 bp, Homo sapiens
cctccactattacagcttataggaaattacaatccactttacaggcctcaaaggttcattctggccgagcggacaggcgtggcggccggagccccagcatccctgcttgaggtccaggagcggagcccgcggccactgccgcctgatcagcgcgaccccggcccgcgcccgccccgcccggcaagatgctgcccgtgtaccaggaggtgaagcccaacccgctgcaggacgcgaacctctgctcacgcgtgttcttctggtggctcaatcccttgtttaaaattggccataaacggagattagaggaagatgatatgtattcagtgctgccagaagaccgctcacagcaccttggagaggagttgcaagggttctgggataaagaagttttaagagctgagaatgacgcacagaagccttctttaacaagagcaatcataaagtgttactggaaatcttatttagttttgggaatttttacgttaattgaggaaagtgccaaagtaatccagcccatatttttgggaaaaattattaattattttgaaaattatgatcccatggattctgtggctttgaacacagcgtacgcctatgccacggtgctgactttttgcacgctcattttggctatactgcatcacttatatttttatcacgttcagtgtgctgggatgaggttacgagtagccatgtgccatatgatttatcggaaggcacttcgtcttagtaacatggccatggggaagacaaccacaggccagatagtcaatctgctgtccaatgatgtgaacaagtttgatcaggtgacagtgttcttacacttcctgtgggcaggaccactgcaggcgatcgcagtgactgccctactctggatggagataggaatatcgtgccttgctgggatggcagttctaatcattctcctgcccttgcaaagctgttttgggaagttgttctcatcactgaggagtaaaactgcaactttcacggatgccaggatcaggaccatgaatgaagttataactggtataaggataataaaaatgtacgcctgggaaaagtcattttcaaatcttattaccaatttgagaaagaaggagatttccaagattctgagaagttcctgcctcagggggatgaatttggcttcgtttttcagtgcaagcaaaatcatcgtgtttgtgaccttcaccacctacgtgctcctcggcagtgtgatcacagccagccgcgtgttcgtggcagtgacgctgtatggggctgtgcggctgacggttaccctcttcttcccctcagccattgagagggtgtcagaggcaatcgtcagcatccgaagaatccagacctttttgctacttgatgagatatcacagcgcaaccgtcagctgccgtcagatggtaaaaagatggtgcatgtgcaggattttactgctttttgggataaggcatcagagaccccaactctacaaggcctttcctttactgtcagacctggcgaattgttagctgtggtcggccccgtgggagcagggaagtcatcactgttaagtgccgtgctcggggaattggccccaagtcacgggctggtcagcgtgcatggaagaattgcctatgtgtctcagcagccctgggtgttctcgggaactctgaggagtaatattttatttgggaagaaatacgaaaaggaacgatatgaaaaagtcataaaggcttgtgctctgaaaaaggatttacagctgttggaggatggtgatctgactgtgataggagatcggggaaccacgctgagtggagggcagaaagcacgggtaaaccttgcaagagcagtgtatcaagatgctgacatctatctcctggacgatcctctcagtgcagtagatgcggaagttagcagacacttgttcgaactgtgtatttgtcaaattttgcatgagaagatcacaattttagtgactcatcagttgcagtacctcaaagctgcaagtcagattctgatattgaaagatggtaaaatggtgcagaaggggacttacactgagttcctaaaatctggtatagattttggctcccttttaaagaaggataatgaggaaagtgaacaacctccagttccaggaactcccacactaaggaatcgtaccttctcagagtcttcggtttggtctcaacaatcttctagaccctccttgaaagatggtgctctggagagccaagatacagagaatgtcccagttacactatcagaggagaaccgttctgaaggaaaagttggttttcaggcctataagaattacttcagagctggtgctcactggattgtcttcattttccttattctcctaaacactgcagctcaggttgcctatgtgcttcaagattggtggctttcatactgggcaaacaaacaaagtatgctaaatgtcactgtaaatggaggaggaaatgtaaccgagaagctagatcttaactggtacttaggaatttattcaggtttaactgtagctaccgttctttttggcatagcaagatctctattggtattctacgtccttgttaactcttcacaaactttgcacaacaaaatgtttgagtcaattctgaaagctccggtattattctttgatagaaatccaataggaagaattttaaatcgtttctccaaagacattggacacttggatgatttgctgccgctgacgtttttagatttcatccagacattgctacaagtggttggtgtggtctctgtggctgtggccgtgattccttggatcgcaatacccttggttccccttggaatcattttcatttttcttcggcgatattttttggaaacgtcaagagatgtgaagcgcctggaatctacaactcggagtccagtgttttcccacttgtcatcttctctccaggggctctggaccatccgggcatacaaagcagaagagaggtgtcaggaactgtttgatgcacaccaggatttacattcagaggcttggttcttgtttttgacaacgtcccgctggttcgccgtccgtctggatgccatctgtgccatgtttgtcatcatcgttgcctttgggtccctgattctggcaaaaactctggatgccgggcaggttggtttggcactgtcctatgccctcacgctcatggggatgtttcagtggtgtgttcgacaaagtgctgaagttgagaatatgatgatctcagtagaaagggtcattgaatacacagaccttgaaaaagaagcaccttgggaatatcagaaacgcccaccaccagcctggccccatgaaggagtgataatctttgacaatgtgaacttcatgtacagtccaggtgggcctctggtactgaagcatctgacagcactcattaaatcacaagaaaaggttggcattgtgggaagaaccggagctggaaaaagttccctcatctcagccctttttagattgtcagaacccgaaggtaaaatttggattgataagatcttgacaactgaaattggacttcacgatttaaggaagaaaatgtcaatcatacctcaggaacctgttttgttcactggaacaatgaggaaaaacctggatccctttaatgagcacacggatgaggaactgtggaatgccttacaagaggtacaacttaaagaaaccattgaagatcttcctggtaaaatggatactgaattagcagaatcaggatccaattttagtgttggacaaagacaactggtgtgccttgccagggcaattctcaggaaaaatcagatattgattattgatgaagcgacggcaaatgtggatccaagaactgatgagttaatacaaaaaaaatccgggagaaatttgcccactgcaccgtgctaaccattgcacacagattgaacaccattattgacagcgacaagataatggttttagattcaggaagactgaaagaatatgatgagccgtatgttttgctgcaaaataaagagagcctattttacaagatggtgcaacaactgggcaaggcagaagccgctgccctcactgaaacagcaaaacaggtatacttcaaaagaaattatccacatattggtcacactgaccacatggttacaaacacttccaatggacagccctcgaccttaactattttcgagacagcactgtgaatccaaccaaaatgtcaagtccgttccgaaggcatttgccactagtttttggactatgtaaaccacattgtacttttttttactttggcaacaaatatttatacatacaagatgctagttcatttgaatatttctcccaacttatccaaggatctccagctctaacaaaatggtttatttttatttaaatgtcaatagttgttttttaaaatccaaatcagaggtgcaggccaccagttaaatgccgtctatcaggttttgtgccttaagagactacagagtcaaagctcatttttaaaggagtaggacagagttgtcacaggtttttgttgttgtttttattgcccccaaaattacatgttaatttccatttatatcagggattctatttacttgaagactgtgaagttgccattttgtctcattgttttctttgacataactaggatccattatttcccctgaaggcttcttgttagaaaatagtacagttacaaccaataggaacaacaaaaagaaaaagtttgtgacattgtagtagggagtgtgtaccccttactccccatcaaaaaaaaaaatggatacatggttaaaggatagaagggcaatattttatcatatgttctaaaagagaaggaagagaaaatactactttctcaaaatggaagcccttaaaggtgctttgatactgaaggacacaaatgtgaccgtccatcctcctttagagttgcatgacttggacacggtaactgttgcagttttagactcagcattgtgacacttcccaagaaggccaaacctctaaccgacattcctgaaatacgtggcattattcttttttggatttctcatttatggaaggctaaccctctgttgactgtaagccttttggtttgggctgtattgaaatcctttctaaattgcatgaataggctctgctaacgtgatgagacaaactgaaaattattgcaagcattgactataattatgcagtacgttctcaggatgcatccaggggttcattttcatgagcctgtccaggttagtttactcctgaccactaatagcattgtcatttgggctttctgttgaatgaatcaacaaaccacaatacttcctgggaccttttgtactttatttgaactatgagtctttaatttttcctgatgatggtggctgtaatatgttgagttcagtttactaaaggttttactattatggtttgaagtggagtctcatgacctctcagaataaggtgtcacctccctgaaattgcatatatgtatatagacatgcacacgtgtgcatttgtttgtatacatatatttgtccttcgtatagcaagttttttgctcatcagcagagagcaacagatgttttattgagtgaagccttaaaaagcacacaccacacacagctaactgccaaaatacattgaccgtagtagctgttcaactcctagtacttagaaatacacgtatggttaatgttcagtccaacaaaccacacacagtaaatgtttattaatagtcatggttcgtattttaggtgactgaaattgcaacagtgatcataatgaggtttgttaaaatgatagctatattcaaaatgtctatatgtttatttggacttttgaggttaaagacagtcatataaacgtcctgtttctgttttaatgttatcatagaattttttaatgaaactaaattcaattgaaataaatgatagttttcatctccaaaaaaaaaaaaaaaaagggcggccgctcgagtctagagggcccgtttaaacccgctgatcagcctcgactgtgccttctagttgccagccatctgttgtttgcccctcccccgtgccttccttgaccctggaaggtgccactcccactgtcctttcctaataaaatgaggaaattgcatc

SEQ ID NO: 536 - DNA, 6140 bp, Homo sapiens
  misc_feature (1)...(6140): n=A,T,C or G
cagtggcgcagtctcagctcactgcagcctccacctcctgtgttcaagcagtcctcctgcctcagccaccagactagcaggtctcccccgcctctttcttggaaggacacttgccattggatttaggacccacttggataatccaggatgatgtcttcactccaacatcctcagtttaattccatgtgcaaatacccttttcccaaataacattcaattctttaccaggaaaggtggctcaatcccttgtttaaaattggccataaacggagattagaggaagatgatatgtattcagtgctgccagaagaccgctcacagcaccttggagaggagttgcaagggttctgggataaagaagttttaagagctgagaatgacgcacagaagccttctttaacaagagcaatcataaagtgttactggaaatcttatttagttttgggaatttttacgttaattgaggaaagtgccaaagtaatccagcccatatttttgggaaaaattattaattattttgaaaattatgatcccatggattctgtggctttgaacacagcgtacgcctatgccacggtgctgactttttgcacgctcattttggctatactgcatcacttatatttttatcacgttcagtgtgctgggatgaggttacgagtagccatgtgccatatgatttatcggaaggcacttcgtcttagtaacatggccatggggaagacaaccacaggccagatagtcaatctgctgtccaatgatgtgaacaagtttgatcaggtgacagtgttcttacacttcctgtgggcaggaccactgcaggcgatcgcagtgactgccctactctggatggagataggaatatcgtgccttgctgggatggcagttctaatcattctcctgcccttgcaaagctgttttgggaagttgttctcatcactgaggagtaaaactgcaactttcacggatgccaggatcaggaccatgaatgaagttataactggtataaggataataaaaatgtacgcctgggaaaagtcattttcaaatcttattaccaatttgagaaagaaggagatttccaagattctgagaagttcctgcctcagggggatgaatttggcttcgtttttcagtgcaagcaaaatcatcgtgtttgtgaccttcaccacctacgtgctcctcggcagtgtgatcacagccagccgcgtgttcgtggcagtgacgctgtatggggctgtgcggctgacggttaccctcttcttcccctcagccattgagagggtgtcagaggcaatcgtcagcatccgaagaatccagacctttttgctacttgatgagatatcacagcgcaaccgtcagctgccgtcagatggtaaaaagatggtgcatgtgcaggattttactgctttttgggataaggcatcagagaccccaactctacaaggcctttcctttactgtcagacctggcgaattgttagctgtggtcggccccgtgggagcagggaagtcatcactgttaagtgccgtgctcggggaattggccccaagtcacgggctggtcagcgtgcatggaagaattgcctatgtgtctcagcagccctgggtgttctcgggaactctgaggagtaatattttatttgggaagaaatacgaaaaggaacgatatgaaaaagtcataaaggcttgtgctctgaaaaaggatttacagctgttggaggatggtgatctgactgtgataggagatcggggaaccacgctgagtggagggcagaaagcacgggtaaaccttgcaagagcagtgtatcaagatgctgacatctatctcctggacgatcctctcagtgcagtagatgcggaagttagcagacacttgttcgaactgtgtatttgtcaaattttgcatgagaagatcacaattttagtgactcatcagttgcagtacctcaaagctgcaagtcagattctgatattgaaagatggtaaaatggtgcagaaggggacttacactgagttcctaaaatctggtatagattttggctcccttttaaagaaggataatgaggaaagtgaacaacctccagttccaggaactcccacactaaggaatcgtaccttctcagagtcttcggtttggtctcaacaatcttctagaccctccttgaaagatggtgctctggagagccaagatacagagaatgtcccagttacactatcagaggagaaccgttctgaaggaaaagttggttttcaggcctataagaattacttcagagctggtgctcactggattgtcttcattttccttattctcctaaacactgcagctcaggttgcctatgtgcttcaagattggtggctttcatactgggcaaacaaacaaagtatgctaaatgtcactgtaaatggaggaggaaatgtaaccgagaagctagatcttaactggtacttaggaatttattcaggtttaactgtagctaccgttctttttggcatagcaagatctctattggtattctacgtccttgttaactcttcacaaactttgcacaacaaaatgtttgagtcaattctgaaagctccggtattattctttgatagaaatccaataggaagaattttaaatcgtttctccaaagacattggacacttggatgatttgctgccgctgacgtttttagatttcatccagacattgctacaagtggttggtgtggtctctgtggctgtggccgtgattccttggatcgcaatacccttggttccccttggaatcattttcatttttcttcggcgatattttttggaaacgtcaagagatgtgaagcgcctggaatctacaactcggagtccagtgttttcccacttgtcatcttctctccaggggctctggaccatccgggcatacaaagcagaagagaggtgtcaggaactgtttgatgcacaccaggatttacattcagaggcttggttcttgtttttgacaacgtcccgctggttcgccgtccgtctggatgccatctgtgccatgtttgtcatcatcgttgcctttgggtccctgattctggcaaaaactctggatgccgggcaggttggtttggcactgtcctatgccctcacgctcatggggatgtttcagtggtgtgttcgacaaagtgctgaagttgagaatatgatgatctcagtagaaagggtcattgaatacacagaccttgaaaaagaagcaccttgggaatatcagaaacgcccaccaccagcctggccccatgaaggagtgataatctttgacaatgtgaacttcatgtacagtccaggtgggcctctggtactgaagcatctgacagcactcattaaatcacaagaaaaggttggcattgtgggaagaaccggagctggaaaaagttccctcatctcagccctttttagattgtcagaacccgaaggtaaaatttggattgataagatcttgacaactgaaattggacttcacgatttaaggaagaaaatgtcaatcatacctcaggaacctgttttgttcactggaacaatgaggaaaaacctggatccctttaatgagcacacggatgaggaactgtggaatgccttacaagaggtacaacttaaagaaaccattgaagatcttcctggtaaaatggatactgaattagcagaatcaggatccaattttagtgttggacaaagacaactggtgtgccttgccagggcaattctcaggaaaaatcagatattgattattgatgaagcgacggcaaatgtggatccaagaactgatgagttaatacaaaaaaaaatccgggagaaatttgcccactgcaccgtgctaaccattgcacacagattgaacaccattattgacagcgacaagataatggttttagattcaggaagactgaaagaatatgatgagccgtatgttttgctgcaaaataaagagagcctattttacaagatggtgcaacaactgggcaaggcagaagccgctgccctcactgaaacagcaaaacagagatggggtttcaccatgttggccaggctggtctcaaactcctgacctcaagtgatccacctgccttggcctcccaaactgctgagattacaggtgtgagccaccacgcccagcctgagtatacttcaaaagaaattatccacatattggtcacactgaccacatggttacaaacacttccaatggacagccctcgaccttaactattttcgagacagcactgtgaatccaaccaaaatgtcaagtccgttccgaaggcatttgccactagtttttggactatgtaaaccacattgtacttttttttactttggcaacaaatatttatacatacaagatgctagttcatttgaatatttctcccaacttatccaaggatctccagctctaacaaaatggtttatttttatttaaatgtcaatagtkgktttttaaaatccaaatcagaggtgcaggccaccagttaaatgccgtctatcaggttttgtgccttaagagactacagnagtcagaagctcatttttaaaggagtaggacagagttgtcacaggtttttgttggtgtttktattgcccccaaaattacatgttaatttccatttatatcaggggattctatttacttgaagactgtgaagttgccattttgtctcattgttttctttgacatamctaggatccattatttcccctgaaggcttcttgkagaaaatagtacagttacaaccaataggaactamcaaaaagaaaaagtttgtgacattgtagtagggagtgtgtaccccttactccccatcaaaaaaaaaaatggatacatggttaaaggatagaagggcaatattttatcatatgttctaaaagagaaggaagagaaaatactactttctcaaaatggaagcccttaaaggtgctttgatactgaaggacacaaatgtgaccgtccatcctcctttagagttgcatgacttggacacggtaactgttgcagttttagactcagcattgtgacacttcccaagaaggccaaacctctaaccgacattcctgaaatacgtggcattattcttttttggatttctcatttaggaaggctaaccctctgttgamtgtamkccttttggtttgggctgtattgaaatcctttctaaattgcatgaataggctctgctaaccgtgatgagacaaactgaaaattattgcaagcattgactataattatgcagtacgttctcaggatgcatccaggggttcattttcatgagcctgtccaggttagtttactcctgaccactaatagcattgtcatttgggctttctgttgaatgaatcaacaaaccacaatacttcctgggaccttttgtactttatttgaactatgagtctttaatttttcctgatgatggtggctgtaatatgttgagttcagtttactaaaggttttactattatggtttgaagggagtctcatgacctctcagaaaaggtgcacctccctgaaattgcatatatgtatatagacatgcacacgtgtgcatttgtttgtatacatatatttgtccttcgtatagcaagttttttgctcatcagcagagagcaacagatgttttattgagtgaagccttaaaaagcacacaccacacacagctaactgccaaaatacattgaccgtagtagctgttcaactcctagtacttagaaatacacgtatggttaatgttcagtccaacaaaccacacacagtaaatgtttattaatagtcatggttcgtattttaggtgactgaaattgcaacagtgatcataatgaggtttgttaaaatgatagctatattcaaaatgtctatatgtttatttggacttttgaggttaaagacagtcatataaacgtcctgtttctgttttaatgttatcatagaattttttaatgaaactaaattcaattgaaataaatgatagttttcatctccaaaaaaaaaaaaaaagggcggcccgctcgagtctagagggcccggtttaaacccgctgatcagcctcgactgtgccttctagttgccagccatctgttgtttggccctcccccgtgccttccttgaccctggaaggggccactccc

SEQ ID NO: 537 - protein, 1228 aa, Homo sapiens
MLPVYQEVKPNPLQDANLCSRVFFWWLNPLFKIGHKRRLEEDDMYSVLPEDRSQHLGEELQGFWDKEVLRAENDAQKPSLTRAIIKCYWKSYLVLGIFTLIEESAKVIQPIFLGKIINYFENYDPMDSVALNTAYAYATVLTFCTLILAILHHLYFYHVQCAGMRLRVAMCHMIYRKALRLSNMAMGKTTTGQIVNLLSNDVNKFDQVTVFLHFLWAGPLQAIAVTALLWMEIGISCLAGMAVLIILLPLQSCFGKLFSSLRSKTATFTDARIRTMNEVITGIRIIKMYAWEKSFSNLITNLRKKEISKILRSSCLRGMNLASFFSASKIIVFVTFTTYVLLGSVITASRVFVAVTLYGAVRLTVTLFFPSAIERVSEAIVSIRRIQTFLLLDEISQRNRQLPSDGKKMVHVQDFTAFWDKASETPTLQGLSFTVRPGELLAVVGPVGAGKSSLLSAVLGELAPSHGLVSVHGRIAYVSQQPWVFSGTLRSNILFGKKYEKERYEKVIKACALKKDLQLLEDGDLTVIGDRGTTLSGGQKARVNLARAVYQDADIYLLDDPLSAVDAEVSRHLFELCICQILHEKITILVTHQLQYLKAASQILILKDGKMVQKGTYTEFLKSGIDFGSLLKKDNEESEQPPVPGTPTLRNRTFSESSVWSQQSSRPSLKDGALESQDTENVPVTLSEENRSEGKVGFQAYKNYFRAGAHWIVFIFLILLNTAAQVAYVLQDWWLSYWANKQSMLNVTVNGGGNVTEKLDLNWYLGIYSGLTVATVLFGIARSLLVFYVLVNSSQTLHNKMFESILKAPVLFFDRNPIGRILNRFSKDIGHLDDLLPLTFLDFIQTLLQVVGVVSVAVAVIPWIAIPLVPLGIIFIFLRRYFLETSRDVKRLESTTRSPVFSHLSSSLQGLWTIRAYKAEERCQELFDAHQDLHSEAWFLFLTTSRWFAVRLDAICAMFVIIVAFGSLILAKTLDAGQVGLALSYALTLMGMFQWCVRQSAEVENMMISVERVIEYTDLEKEAPWEYQKRPPPAWPHEGVIIFDNVNFMYSPGGPLVLKHLTALIKSQEKVGIVGRTGAGKSSLISALFRLSEPEGKIWIDKILTTEIGLHDLRKKMSIIPQEPVLFTGTMRKNLDPFNEHTDEELWNALQEVQLKETIEDLPGKMDTELAESGSNFSVGQRQLVCLARAILRKNQILIIDEATANVDPRTDELIQKKSGRNLPTAPC

SEQ ID NO: 538 - protein, 1261 aa, Homo sapiens
MYSVLPEDRSQHLGEELQGFWDKEVLRAENDAQKPSLTRAIIKCYWKSYLVLGIFTLIEESAKVIQPIFLGKIINYFENYDPMDSVALNTAYAYATVLTFCTLILAILHHLYFYHVQCAGMRLRVAMCHMIYRKALRLSNMAMGKTTTGQIVNLLSNDVNKFDQVTVFLHFLWAGPLQAIAVTALLWMEIGISCLAGMAVLIILLPLQSCFGKLFSSLRSKTATFTDARIRTMNEVITGIRIIKMYAWEKSFSNLITNLRKKEISKILRSSCLRGMNLASFFSASKIIVFVTFTTYVLLGSVITASRVFVAVTLYGAVRLTVTLFFPSAIERVSEAIVSIRRIQTFLLLDEISQRNRQLPSDGKKMVHVQDFTAFWDKASETPTLQGLSFTVRPGELLAVVGPVGAGKSSLLSAVLGELAPSHGLVSVHGRIAYVSQQPWVFSGTLRSNILFGKKYEKERYEKVIKACALKKDLQLLEDGDLTVIGDRGTTLSGGQKARVNLARAVYQDADIYLLDDPLSAVDAEVSRHLFELCICQILHEKITILVTHQLQYLKAASQILILKDGKMVQKGTYTEFLKSGIDFGSLLKKDNEESEQPPVPGTPTLRNRTFSESSVWSQQSSRPSLKDGALESQDTENVPVTLSEENRSEGKVGFQAYKNYFRAGAHWIVFIFLILLNTAAQVAYVLQDWWLSYWANKQSMLNVTVNGGGNVTEKLDLNWYLGIYSGLTVATVLFGIARSLLVFYVLVNSSQTLHNKMFESILKAPVLFFDRNPIGRILNRFSKDIGHLDDLLPLTFLDFIQTLLQVVGVVSVAVAVIPWIAIPLVPLGIIFIFLRRYFLETSRDVKRLESTTRSPVFSHLSSSLQGLWTIRAYKAEERCQELFDAHQDLHSEAWFLFLTTSRWFAVRLDAICAMFVIIVAFGSLILAKTLDAGQVGLALSYALTLMGMFQWCVRQSAEVENMMISVERVIEYTDLEKEAPWEYQKRPPPAWPHEGVIIFDNVNFMYSPGGPLVLKHLTALIKSQEKVGIVGRTGAGKSSLISALFRLSEPEGKIWIDKILTTEIGLHDLRKKMSIIPQEPVLFTGTMRKNLDPFNEHTDEELWNALQEVQLKETIEDLPGKMDTELAESGSNFSVGQRQLVCLARAILRKNQILIIDEATANVDPRTDELIQKKIREKFAHCTVLTIAHRLNTIIDSDKIMVLDSGRLKEYDEPYVLLQNKESLFYKMVQQLGKAEAAALTETAKQRWGFTMLARLVSNS

SEQ ID NO: 539 - protein, 10 aa, Artificial Sequence
  Made in a lab
CLSHSVAVVT

SEQ ID NO: 540 - protein, 9 aa, Artificial Sequence
  Made in a lab
AVVTASAAL

SEQ ID NO: 541 - protein, 14 aa, Homo sapiens
LAGLLCPDPRPLEL

SEQ ID NO: 542 - protein, 15 aa, Homo sapiens
TQVVFDKSDLAKYSA

SEQ ID NO: 543 - protein, 12 aa, Homo sapiens
FMGSIVQLSQSV

SEQ ID NO: 544 - protein, 18 aa, Homo sapiens
TYVPPLLLEVGVEEKFMT

SEQ ID NO: 545 - protein, 18 aa, Homo sapiens
MDRLVQRFGTRAVYLASV

SEQ ID NO: 546 - protein, 29 aa, Homo sapiens
FVGEGLYQGVPRAEPGTEARRHYDEGVRM

SEQ ID NO: 547 - protein, 58 aa, Homo sapiens
VAEEAALGPTEPAEGLSAPSLSPHCCPCRARLAFRNLGALLPRLHQLCCRMPRTLRRL

SEQ ID NO: 548 - protein, 18 aa, Homo sapiens
IDWDTSALAPYLGTQEEC

SEQ ID NO: 549 - protein, 18 aa, Homo sapiens
LEALLSDLFRDPDHCRQA

SEQ ID NO: 550 - protein, 14 aa, Homo sapiens
SDHWRGRYGRRRPF

SEQ ID NO: 551 - protein, 11 aa, Artificial Sequence
  Made in a lab
FDKSDLAKYSA

SEQ ID NO: 552 - DNA, 2577 bp, Homo sapiens
agcatatgtaacatgacctgtgcttcagtgttcttttgtgatcaaaaattccttacttttagttttttatctatggtagaaccacccagagcaggggtcctcaactcccaggccacagactcataccagtccacggactattatgaaccacaccacacaggaggaggtgagcactaggcaagccaaggaagcttcacctgtacttacagccacacgccatggctcatattacagcctgaactctgcctccactcagatcagtgataacattagaaactcattggagcacgaaccctgttgtgaactgcctatccgaaggatctaggttgtgtgcttcgtatgagaatctaatgccagatgatctatcattgtctcactttgcccccagataagaccatctagttgcagaaaaataagctcagagcttccactgattctacattatggatatgtgccgccgaagcaagcacaaagccctacttttacacatgcctagtgatgcttcatggacaaggcttggctctgttgagtccaactaacctacctgagattctgagatttctcttcaatggcttcctgtgagctagagtttgaaaatatcttaaaatcttgagctagagatggaagtagcttggacgattttcattatcatgtaaatcgggtcactcaaggggccaaccacagctgggagccactgctcaggggaaggttcatatgggactttctactgcccaaggttctatacaggatataaaggtgcctcacagtatagatctggtagcaaagaagaagaaacaaacactgatctctttctgccacccctctgaccctttggaactcctctgaccctttagaacaagcctacctaatatctgctagagaaaagaccaacaacggcctcaaaggatctcttaccatgaaggtctcagctaattcttggctaagatgtgggttccacattaggttctgaatatggggggaagggtcaatttgctcattttgtgtgtggataaagtcaggatgcccaggggccagagcagggggctgctgctttgggaacaatggctgagcatataaccataggtatgggaacaaaaaacatcaaagtcactgtatcaattgccatgaagactcgagggacctgaatctaccgattcatcttaaggcagcaggaccagtttgagtggcaacaatgcagcagcagaatcaatggaaacaacagaatgattgcaatgtccttttttttctcctccttctgacttgataaaagggaccgtcttccttggatttagtgaacccctttggttcctgaaaaattcaaggagtatctaggacatagtccccagaagacagtacaagactttctgataaactggacatttcaagrcccaaataactaatcagaaaaatcaaagatgtgatactattttttatcccatgcataggtgctacacttggatcaaatgaacaatgttgggatctytatggataaaggtcttaaaagtcctgagataaagaatcctgcacccactggtacttctaacttgtcttgttttttgtctgwtttctggctgatgcaggggactaactcactgccacgcgaaaactacctgaactgaactatgacatctcacctgatatgtaagatgtaactgttataattattttaaacctcaatttagcattaactagccttttaatgtaaacacttacacattatgaygactagaaacagcatactctctggccgtctgtccagatagatcttgagaagatacatcaatgttttgctcaagtagaaggctgactatacttgccgatccacaacatacagcaagtatgagagcagttctaaaatgacagagataggaacagtaataaagttattktaaaagctaatttgatatactttaccaatttaacatcttgcctgtccgtgcagaatcaaacatttacatgcactaaaagacataagcatcttcagtgctcaagtgttcatctttgtaaaataccaccaaggttaaaaggaagggacaaaaaaaaaaaaccctcttatctcagtggggtattgcatagcagaagctactaatttgaagtcctttgatggacaagaaacaatattagggccacttatctgaaatgaacaaagatttaagtgaagatttcatcacagcttccctagactgatatgctgtaatagaaaatcagctagggggtaaaataaataagagctctctgcatgctgaaagcaagtaagattaataataatggtaagaatagtagtcacaggagtttcagttaatgatgccaataagcatgtgctaggcactgaattaaatgccacatatatctttcttatgcgcagcaaactttgaaggatatattctcctacttttcatatatgacaacatatttggtggtaaataacgttcccaaggtcacacacctagcaagtaagaaagttaggaattaaacccagtattgtgtgaatctaaagcctaacttttttctctttatcacccacctacggcttgtcttcattaaaggaaaagtgtatccacttaaaaaaaaaaaaaa

SEQ ID NO: 553 - protein, 58 aa, Homo sapiens
SICNMTCASVFFCDQKFLTFSFLSMVEPPRAGVLNSQATDSYQSTDYYEPHHTGGGEH

SEQ ID NO: 554 - protein, 59 aa, Homo sapiens
LQKNKLRASTDSTLWICAAEASTKPYFYTCLVMLHGQGLALLSPTNLPEILRFLFNGFL

SEQ ID NO: 555 - protein, 71 aa, Homo sapiens
LGRFSLSCKSGHSRGQPQLGATAQGKVHMGLSTAQGSIQDIKVPHSIDLVAKKKKQTLISFCHPSDPLELL

SEQ ID NO: 556 - protein, 81 aa, Homo sapiens
NHPEQGSSTPRPQTHTSPRTIMNHTTQEEVSTRQAKEASPVLTATRHGSYYSLNSASTQISDNIRNSLEHEPCCELPIRRI

SEQ ID NO: 557 - protein, 54 aa, Homo sapiens
SLSATPLTLWNSSDPLEQAYLISAREKTNNGLKGSLTMKVSANSWLRCGFHIRF

SEQ ID NO: 558 - protein, 77 aa, Homo sapiens
  VARIANT (1)...(77): Xaa = Any amino acid
NDRDRNSNKVIXKANLIYFTNLTSCLSVQNQTFTCTKRHKHLQCSSVHLCKIPPRLKGRDKKKKPSYLSGVLHSRSY

SEQ ID NO: 559 - protein, 50 aa, Homo sapiens
TLPPLRSVITLETHWSTNPVVNCLSEGSRLCASYENLMPDDLSLSHFAPR

SEQ ID NO: 560 - protein, 56 aa, Homo sapiens
IGSLKGPTTAGSHCSGEGSYGTFYCPRFYTGYKGASQYRSGSKEEETNTDLFLPPL

SEQ ID NO: 561 - protein, 57 aa, Homo sapiens
  VARIANT (1)...(57): Xaa = Any amino acid
VLHLDQMNNVGIXMDKGLKSPEIKNPAPTGTSNLSCFLSXFWLMQGTNSLPRENYLN

SEQ ID NO: 562 - protein, 59 aa, Homo sapiens
  VARIANT (1)...(59): Xaa = Any amino acid
DLYPXRSQHCSFDPSVAPMHGIKNSITSLIFLISYLXLEMSSLSESLVLSSGDYVLDTP

SEQ ID NO: 563 - protein, 79 aa, Homo sapiens
CFLFPYLWLYAQPLFPKQQPPALAPGHPDFIHTQNEQIDPSPHIQNLMWNPHLSQELAETFMVRDPLRPLLVFSLADIR

SEQ ID NO: 564 - protein, 64 aa, Homo sapiens
ACSKGSEEFQRVRGVAERDQCLFLLLCYQIYTVRHLYILYRTLGSRKSHMNLPLSSGSQLWLAP

SEQ ID NO: 565 - protein, 57 aa, Homo sapiens
  VARIANT (1)...(57): Xaa = Any amino acid
LYYCSYLCHFRTALILAVCCGSASIVSLLLEQNIDVSSQDLSGQTAREYAVSSXHNV

SEQ ID NO: 566 - protein, 55 aa, Homo sapiens
ILLEFFRNQRGSLNPRKTVPFIKSEGGEKKGHCNHSVVSIDSAAALLPLKLVLLP

SEQ ID NO: 567 - protein, 51 aa, Homo sapiens
YSDFDVFCSHTYGYMLSHCSQSSSPLLWPLGILTLSTHKMSKLTLPPIFRT

SEQ ID NO: 568 - protein, 75 aa, Homo sapiens
KVGEYILQSLLRIRKIYVAFNSVPSTCLLASLTETPVTTILTIIINLTCFQHAESSYLFYPLADFLLQHISLGKL

SEQ ID NO: 569 - DNA, 4809 bp, Homo sapiens
gcatccagagtggtggactggttacaggctatgaacctacactgatgcggcaccaccacccagagtccacrggttatgttggttcacatttactcttgctgtggtatggtctataggtttggacagatgtccgataatcctttttacattttggcatccttgggtagctcgtcttgtaggaatggacttgcttcaaagtggaggcaggcagatccttcagacgggtatatggagccctgttttcagttgcttttctaattctctcttatcgtttacctcaaaatcttcctgaggtctcgcttccttttaaaatccttgtctactttgcagcatcactctgacactcccattgattcctcagcacctactgactacacggttaggagtgcaagggtagaattcatgttttattcatctttgggtctgtagcacccagcaaagtgctcagtaaatgcgcagtaattgatttgacctctgaacaaatacacactgtactaagaatctacacaccgaaagacaaaaacaagacaaatttgagtgctacaggtgtcacgcttggcatcacacatgtgcctgtgtattcctctaggtggttaccaggagctctgccactgcatgtccactagtgacgggttcgctccaccaccccagctgggtagccgctgctctcacataaggggtccaattaaaattgccaggaataaattcccccggactttgacttctcaagagctaagaaggtttgctgagtattctggcatgatgtttggtgatcaaacaactgctggccaaaaatgatgagtatttccccctcttgctgaagatgtgctccatacaatagtccatcacattcatcattcatcagtctggaagtgtgcagaacaacatgtaatagataatatgattggctgcacacttccagactgatgaatgatgaatgtgatggactattgtatggagcacatcttcagcaagagggggaaatactcatcattttatctattacatgttgttctggtttttttttttttccaatgtccagcctaaactataaagtactttgagaacgcacagtgagccataagcttgccaataaagagtcctctgtggtatggaactggcttatttcatacacaatctgcaaacaatgagggcactattggaaacatactgtgctgcacagagcatttacaccgcttatctttaatcttccccagcaatccttgctttgtgcgcatttatgatccttgctctcagaagtccacatacttttccccaaccgtaacaaattatttaactcatctaatgtatgtatgtccgcgcagtctgaaaacagtaattgtccttgggaagaagtgagtttaagagagctctagggcactcatcacaactccagccctgccctccatgtggtagcagctctttggactggggctaagtgcttattcttgtgcttcattcctggtaagctcaatttctttaccttaggataactttgctggaaaagggctcagattcagccgaccattgtggcctctgtggctgtcacagcttgtccctgacatgctatgatgttgggtccccttctcatccccttgggatttcttctgctggcccacagccagaacaactaggccttttactccaccatccctttgttttcttttgtttcgttggtaaaaatcaatccttctaccatccatgcatagcaatttctaaaaactgaatttcaagagcagtatctgaagaaacaaacatgatttggtccttttagtaaacagaataaattttaataaatcaactttgaaatagttgtaagagttaagaaaaagcacaaaactgagatcatcagagcagcttggcctcaaaggacaggcagcaggattctacagggtttgagccttcctaagtgaagctgtttcctgcaggctccctgctccaagctcctagctaacagccccttctcccacgattggcaacaaagagcaaaaataactttgtacttgatgctgagtcagtgtaaaaagccataaaaaattccctctaaatgtcaaaatgtttgcctcctttgaggcttctctcctcctactgggtctggataaattagcactgggcttatattgagtcacagatctgggccctgccacagagagcttcctcctagtgtgtgatgctttttctccaaactattgatacaaaatgcactggaatagaaatcaacagaaactggtcaaaggtgtggcatacacattctcatgtagatgtaaagctgtgcttagaattcctttgtggagtctggtttggtcttggttttcttggtgtttgattcatttttttacgtaaattacaaaaaccctccacatttcttcatggattgtattagtccatgttctccagagaagcagaacgagttggatgtatgttttggaagagattatgaggaaccggctcatgtgatgaaggaggttgagaggtcctgtgctctgccatctgcaagctgaagacctggaaagctgagggtgtggctccagtctgagtctgaaggcccaagaaccaggggaaccaacggtgtagattccaggttgaaggcaggagaagatggatgtcccagctcagcaggcaggcaggaagcaaatggggtaaattcctccttcctccaccttttgttccattcaggccttcaacagattggatgagcgcccccccacccccacactagggagggccatctgctttactgagtcggctgagtcaagtgccagcctcatcccaaaacactctccagacacacgcagaaatgtttcatctgggcaccctgtggccagtcatgctgacacacagaactaaccatgacatggattcttcttaaagcagtgataggagcgaacagaaacattttcataattttcaattatttttaatgaaaactatatctgatggaattgtttaaacctagtctggccacacattatttcctgggaccgcccctccttcaatcccttggacactgatgactttatgcccagattacactggaggcctgtgctgattttctaacacatacctgcaactgagctggcaaaaagaaaactaggcaagtatgacagatacatgatgcacaggctaagtgcaaaggaaagaaaaacaccaactgcagggatgagggactcacccctttagaagtttctacttgagcagctagaagactacaatgccactcatcaaaacagtgactcagggggagtatttgggataaaggaggaatctgatgttggaggtcaaatttgaagtgtctttaagacctacaggtaacgagacagctggacaaacacatggaactcaggacaaaggctctaaggacagcacagcagctgacatcctgtgtgacagccttgaaagcagcaggcccgccgctcacattttggaagggaaaatgggtacaatgttgtctgccactttggggccttcttgggtcacatgcattttacatttatgcagttgatatatttatgtttcctgggtcttttatacattagacaccatgattctcaatcctttgttattttgtattacaaaaagctgaattattatttcaaatatgggcaaattagagccttccatattgccaaggtgtatcaaccacactgataycaygatctctcttttgaattagttttccagttcacacctaccatttatttcatgattggtttcagacttgttcctcctggaaacactccctaacaagcacccttgcaggaatgaagacacaccacacacatctaccccattactgcatgtactcaagagtcagcttttatatgatctctcccaagtgctcctataatggggatctttcactcaccctaaagtgaggacaaaatacttgaaagcatgagcccagtgcctgtaggtgtgcaattaacctcagaccaaggaagtgccgaacgcatctggcttttagcaaggcacctgacaaagtccttcaggatgtttttgtacatgagctagagaaatgtacctggagaacagcttctactgccagatgatcttactcaaaagatgcagattaagcaaaatatcaacccaaagggtggtccctgatggcccaccagcccctgtgcctggctcgtttcctatgtttcctagatttggtttcagacttgctcctcctgcagacactccctaaccagcatccttgcagaaaactggtgaactagaaaaggcctgtgtgggtcacgtggccacccaacaccacagcagtgtctaaggtatgcgtgggagcctgcacagcaggagcggggtcttctggagacccgcatgagatgcaaagggcagtggacaaggagccaagggaggtggctctagtcacgctggtatggtgccagcttgaggatgctgggcaagtcccgagccgtctgccttcctagtaccacagttaccactgtctgttacctcgcgagttcaagtgcttcacgtgagacagctacgagacaggcccctggaaactggaaaatgcyaagtaaatgtcatgcacaattgttgttcacattttatctcaatcacttttaccaaatcaggctaaaccctgggtattcataacgtcttgggctgtacaaattgttccttgaaatgactcagagacattttctgaattggcttccatcagccaagcatttcttcagaactggaaaaatgctttaaatttggctttgtcatgattattaaaacactctgtacattttttattattgaaattaacacattgcctactttttaaaaattggaaaaagaaaaaaaaaaaaaaaa

SEQ ID NO: 570 - DNA, 951 bp, Homo sapiens
aaaattgaatattgagataccattctttagtgttaccttttttacccacatgtgtttctgaaaatattggaattttattcatcttaaaaattggacccggccttatttaccatctttaatccattttagtactatgggtgagtacatggaattgaagtctggcttaaatcttcagaaagttatatatctattttattttatttttttgagacagagtctcgctgtgtcacccaggctggagtgcggtgccacaatcttggctcactgcaacctctgagtcccaggttcaagcgatactcatgcctcggcctcctgagtagctgggactacaggcgtgcaccaccacatctggctaatctttttttgtatttttagtagagacggggtttcactgtggtctccatctcctgacctcgtgatccgcctgcctcccaaagtgctgggattacaggcatgagccaccgcacacagctgggactgggtaatttataaagaaaagaggtttaatgactcacagttccgcatggctggagaggcctcaggaaacttacaatcatggtggaaggcgaaggggaagcaaggcacgtcttacatggtggcaggagagaacgagtgaggggggagactgccacaaactttttttttttgagacaagagtctggccctgttgcccaggctggagtgcagtggcatgatctcagctcactgcaacctctgcctcacaggttcaagcaattctcatgcctcagcctcccgcatagctgggaccacaggtatgcaccaccacacctagctaatttttgtagttttagtagagatggggtctcactatgttgctcaggctggtctaaaactcctgggctccagcaatccgcctgccttggcctcccaaagtgctggggttacaggcataagccaccacatccagcctgccacatacttttaaactat

SEQ ID NO: 571 - DNA, 819 bp, Homo sapiens
cagcttaaaaatggtttcttgaaatcagtgattagcattcactcaccagtacccctactaaggggtaggcactggtttgtactcctgggaatacaggagtacaccagaatttatttctgcttattgcttttgttgcaaatgccgtggcttcatctgaggaattctagaattcagagggtgtagccctccactctgctgtcttgctatctgctctcattgcatccgtttaacctgcattctgaaagatgtttctcaggtttttccttgacgattttcttcttttctgattctgacaatgttttaaatcattgtactgtggttatcatttctctgcatttattttacccatcttcctttgtaacttgtcctattgtcttttaatttctgcctgttctttatggctttcaacttcataaataacatgttttctcaaatctctttgtgaattccagagagggccaggcacggtggctcacatctgtaatcccagcactttggggaggctgagacgggtggatcacttgaggtcaggagtttgagaccagcctggccaacatggtgaaatcccgtttcactaaaaatacaaaaattacccaggcatggtggcgggcgcctgtaatcccaggtactcgggaggctgagggaggagaatcgcttgaacctgggaggctgagggaggagaatcgcttgaacccgggaggcagaggttgcagtgaaccgagatcatgttgctgcactccagcctggtcaacagagcaagactctgcctcaaaaacaaacaaataaacaaacaaacaaacaaaacagagagattttgct

SEQ ID NO: 572 - DNA, 203 bp, Homo sapiens
tatagaatactcaagctatgcatcaagcttggtaccgagctcggatccactatttacggccgccagtgtgctggaattcgcccttagctcggatccactagtccagtgtggtggaattccattgtgttgggcccaacacaatggagccaccacatccagcctgccacatacttttaaactatcaggtctcatgagaactcatg

SEQ ID NO: 573 - protein, 132 aa, Homo sapiens
MVEGEGEARHVLHGGRRERVRGETATNFFFLRQESGPVAQAGVQWHDLSSLQPLPHRFKQFSCLSLPHSWDHRYAPPHLANFCSFSRDGVSLCCSGWSKTPGLQQSACLGLPKCWGYRHKPPHPACHILLNY

SEQ ID NO: 574 - protein, 62 aa, Homo sapiens
MTHSSAWLERPQETYNHGGRRRGSKARLTWWQERTSEGGDCHKLFFFETRVWPCCPGWSAVA

SEQ ID NO: 575 - protein, 76 aa, Homo sapiens
MVKSRFTKNTKITQAWWRAPVIPGTREAEGGESLEPGRLREENRLNPGGRGCSEPRSCCCTPAWSTEQDSASKTNK

SEQ ID NO: 576 - protein, 68 aa, Homo sapiens
  VARIANT (1)...(68): Xaa = Any Amino Acid
MLGKSRAVCLPSTTVTTVCYLASSSASRETATRQAPGNWKMXSKCHAQLLFTFYLNHFYQIRLNPGYS

SEQ ID NO: 577 - protein, 57 aa, Homo sapiens
MYLENSFYCQMILLKRCRLSKISTQRVVPDGPPAPVPGSFPMFPRFGFRLAPPADTP

SEQ ID NO: 578 - protein, 51 aa, Homo sapiens
MQLIYLCFLGLLYIRHHDSQSFVILYYKKLNYYFKYGQIRAFHIAKVYQPH

SEQ ID NO: 579 - protein, 56 aa, Homo sapiens
MHFTFMQLIYLCFLGLLYIRHHDSQSFVILYYKKLNYYFKYGQIRAFHIAKVYQPH

SEQ ID NO: 580 - protein, 67 aa, Homo sapiens
MELRTKALRTAQQLTSCVTALKAAGPPLTFWKGKWVQCCLPLWGLLGSHAFYIYAVDIFMFPGSFIH

SEQ ID NO: 581 - protein, 77 aa, Homo sapiens [sequence omitted]

SEQ ID NO: 582 - protein, 51 aa, Homo sapiens
MLFLQTIDTKCTGIEINRNWSKVWHTHSHVDVKLCLEFLCGVWFGLGFLGV

SEQ ID NO: 583 - protein, 60 aa, Homo sapiens [sequence omitted]

SEQ ID NO: 584 - protein, 76 aa, Homo sapiens
MCLCIPLGGYQELCHCMSTSDGFAPPPQLGSRCSHIRGPIKIARNKFPRTLTSQELRRFAEYSGMMFGDQTTAGQK

SEQ ID NO: 585 - protein, 50 aa, Homo sapiens
MVYRFGQMSDNPFYILASLGSSSCRNGLASKWRQADPSDGYMEPCFQLLF

SEQ ID NO: 586 - protein, 60 aa, Homo sapiens
MLVHIYSCCGMVYRFGQMSDNPFYILASLGSSSCRNGLASKWRQADPSDGYMEPCFQLLF

SEQ ID NO: 587 - DNA, 1408 bp, Homo sapiens
ctggacactttgcgagggcttttgctggctgctgctgctgcccgtcatgctactcatcgtagcccgcccggtgaagctcgctgctttccctacctccttaagtgactgccaaacgcccaccggctggaattgctctggttatgatgacagagaaaatgatctcttcctctgtgacaccaacacctgtaaatttgatggggaatgtttaagaattggagacactgtgacttgcgtctgtcagttcaagtgcaacaatgactatgtgcctgtgtgtggctccaatggggagagctaccagaatgagtgttacctgcgacaggctgcatgcaaacagcagagtgagatacttgtggtgtcagaaggatcatgtgccacagatgcaggatcaggatctggagatggagtccatgaaggctctggagaaactagtcaaaaggagacatccacctgtgatatttgccagtttggtgcagaatgtgacgaagatgccgaggatgtctggtgtgtgtgtaatattgactgttctcaaaccaacttcaatcccctctgcgcttctgatgggaaatcttatgataatgcatgccaaatcaaagaagcatcgtgtcagaaacaggagaaaattgaagtcatgtctttgggtcgatgtcaagataacacaactacaactactaagtctgaagatgggcattatgcaagaacagattatgcagagaatgctaacaaattagaagaaagtgccagagaacaccacataccttgtccggaacattacaatggcttctgcatgcatgggaagtgtgagcattctatcaatatgcaggagccatcttgcaggtgtgatgctggttatactggacaacactgtgaaaaaaaggactacagtgttctatacgttgttcccggtcctgtacgatttcagtatgtcttaatcgcagctgtgattggaacaattcagattgctgtcatctgtgtggtggtcctctgcatcacaaggaaatgccccagaagcaacagaattcacagacagaagcaaaatacagggcactacagttcagacaatacaacaagagcgtccacgaggttaatctaaagggagcatgtttcacagtggctggactaccgagagcttggactacacaatacagtattatagacaaaagaataagacaagagatctacacatgttgccttgcatttgtggtaatctacaccaatgaaaacatgtactacagctatatttgattatgtatggatatatttgaaatagtatacattgtcttgatgttttttctgtaatgtaaataaactatttatatcacacaatawagttttttctttcccatgtatttgttatatataataaatactcagtgatgagaaaaaaaaaaaaaaaaaaaaaarwmgaccc

SEQ ID NO: 588 - protein, 81 aa, Homo sapiens [sequence omitted]

SEQ ID NO: 589 - protein, 157 aa, Homo sapiens
MTMCLCVAPMGRATRMSVTCDRLHANSRVRYLWCQKDHVPQMQDQDLEMESMKALEKLVKRRHPPVIFASLVQNVTKMPRMSGVCVILTVLKPTSIPSALLMGNLMIMHAKSKKHRVRNRRKLKSCLWVDVKITQLQLLSLKMGIMQEQIMQRMLTN

SEQ ID NO: 590 - protein, 347 aa, Homo sapiens
MLLIVARPVKLAAFPTSLSDCQTPTGWNCSGYDDRENDLFLCDTNTCKFDGECLRIGDTVTCVCQFKCNNDYVPVCGSNGESYQNECYLRQAACKQQSEILVVSEGSCATDAGSGSGDGVHEGSGETSQKETSTCDICQFGAECDEDAEDVWCVCNIDCSQTNFNPLCASDGKSYDNACQIKEASCQKQEKIEVMSLGRCQDNTTTTTKSEDGHYARTDYAENANKLEESAREHHIPCPEHYNGFCMHGKCEHSINMQEPSCRCDAGYTGQHCEKKDYSVLYVVPGPVRFQYVLIAAVIGTIQIAVICVVVLCITRKCPRSNRIHRQKQNTGHYSSDNTTRASTRLI

SEQ ID NO: 591 - DNA, 565 bp, Homo sapien
actaaagcaaatgaacaagctgacttgctagtatcatctgcattcattgaagcacaagaacttcatgccttgactcatgtaaatgcaataggattaaaaaataaatttgatatcacatggaaacagacaaaaaatattgtacaacattgcacccagtgtcagattctacacctggccactcaggaagcaagagttaatcccagaggtctatgtcctaatgtgttatggcaaatggatgtcatgcacgtaccttcatttggaaaattgtcatttgtccatgtgacagttgatacttattcacatttcatatgggcaacctgccagacaggagaaagtacttcccatgttaaaagacatttattatcttgttttcctgtcatgggagttccagaaaaagttaaaacagacaatgggccaggttactgtagtaaagcatttcaaaaattcttaaatcagtggaaaattacacatacaataggaattctctataattcccaaggacaggccataattgaaggaactaatagaacactcaaagctcaattggttaaacaaaaaaaaaaaa

SEQ ID NO: 592 - protein, 188 aa, Homo sapien
TKANEQADLLVSSAFIEAQELHALTHVNAIGLKNKFDITWKQTKNIVQHCTQCQILHLATQEARVNPRGLCPNVLWQMDVMHVPSFGKLSFVHVTVDTYSHFIWATCQTGESTSHVKRHLLSCFPVMGVPEKVKTDNGPGYCSKAFQKFLNQWKITHTIGILYNSQGQAIIEGTNRTLKAQLVKQKKK

SEQ ID NO: 593 - DNA, 271 bp, Homo sapien
  misc_feature (1)...(271): n = A,T,C or G
actttatgttcnagtgcanaaanccncctggattgccaccntactctcagggctgtganttgtgcncccanagcaacctgggcacgcggggacaggggggccnacaattgagggagcggtgtccctagctggggtctatacatgncngggnaagggcngctgagtnccatnagcaaagganctagnatntgcgggggtgcggcctgggcctaccctttnaagcatccntngatccactccangaanccnggggtagncaggtttnccaaca

SEQ ID NO: 594 - DNA, 376 bp, Homo sapien
  misc_feature (1)...(376): n = A,T,C or G
cctttgggggnggggggaacctttaccattgtncccctttatttcatttggttngggttcgcgccctcnngggccaacaaagttatcgtnnttgaagagaanatttttttggnttngncccgattaagcgncaaatgtgtagcaaaangccgtgccacttgtggcgtagctncgtcgggtcgattcgacgacaaggcgtngcgcgntancgttagtctcnaatngacccngtggcatgagcccacganggnttcgtgtcgtcacatggnctctagacataacgcncnccnttttttncagagggggntgccgcccttagggaggnaggggtggggacactagccaanccanantctnaccccattgaagaaaaggn

SEQ ID NO: 595 - DNA, 242 bp, Homo sapien
  misc_feature (1)...(242): n = A,T,C or G
agnctgctgntcgtnccctntatgtggcttcatnntgaggacaanagtngcactgaggcttgngnatgccaggcaaggncaagctggctcaaaaagcatccacccacctctgnaangggtatgccangagcangtgcaccagtcccaactangagncccnggcatgntacatcttcttccacccctnaaantttgngctacaangnccatttttctttttctcttaagggncncntggcttc

SEQ ID NO: 596 - DNA, 535 bp, Homo sapien
  misc_feature (1)...(535): n = A,T,C or G
accagttggatactgctaaanagatatttatgcagcctcatatgttaagtcgtatattttgaaagctttttaaattttttctttaagaagattttagatgcttatcactgagtaccagagggatgtaggctgatgcccttatcaacaaagtcagggactgtggcacacaaggattgactactgcagacacggccacaatgctacctctagagggcctgaatccccctgccctctctggtggggagaagggctggcagagccattagcatgggctccggccaatcctggccactttgacactcctggtgctgacccagggtcctggaggaagggatgaggtgggcagtagagatgctcagggcagtggcccctttccatccacactggaactatttcagtattttaccaccaattcagccattcccttgtgcgctggctgaacatcagccctgctccaggtctcagtttcccctttgtaaagggaaagctctggattcagggagtgatgaagaggtcatcatggtcttgagaattc

SEQ ID NO: 597 - DNA, 257 bp, Homo sapien
  misc_feature (1)...(257): n = A,T,C or G
tttcnatacccaaaantaccccatattangaccanacatttgtctnggaaaaattaccattntntaacntttgggccacctgagannaaatgggtgtaatncatgataagatggancagnattnctcttaagatnngatnagaccccgtttttcacggaacatatccaagnacccaataggnaacaagccacgggnggagtcacaaacatatattctttactctcataatccgtnncacanaactnttgnacttgac

SEQ ID NO: 598 - DNA, 222 bp, Homo sapien
  misc_feature (1)...(222): n = A,T,C or G
nntggntaccgtcnaaacttnncttggtacccgagctcggatccactagtccagtgtggtggaattccattgtgttgggctataagctgtaatagtggagncgtgctnggttcattgcannagnccctccgcanncacncttgnnacaacctgtgagnaggcnataaattattcacataatcatcactgcatgaanctgactcaaacgcatccacntacacc

SEQ ID NO: 599 - DNA, 238 bp, Homo sapien
  misc_feature (1)...(238): n = A,T,C or G
gcatgacatcancgatgtntttggnnacctganattngctaaaactngngnatgccgggnatgnaggtttggtantgatctatgcactcacatctcatggggacgtttcatgtggagtgntcgacaangttgctgnancngagaagtgatgatctcagttgaaagggtcatgtgaatacacnttacacttgaaaaagaagcacattgggaatatcacgaaacgnccaccaacatcctg

SEQ ID NO: 600 - DNA, 232 bp, Homo sapien
  misc_feature (1)...(232): n = A,T,C or G
cgaactatttagactacctaggaaaattattttagtatcagaagaatatcaggggtgtagtactcatcagagctaaatgagagcgctttaaaaatgttagtttgtcttccgccatttctacagaaagctgcaatttcaggttttcaacctaataggtgatatttaanaaaaaaaaaaagcaatcgcaaatagccccactgcttttacaaatcattttttccccaacacaatg

SEQ ID NO: 601 - DNA, 547 bp, Homo sapien
  misc_feature (1)...(547): n = A,T,C or G
cattgtgttggggaaaaaatgatttgtataagcagtggggctatttgcgattgctttttttttttcttaaatatcacctattaggttgaaaacctgaaattgcagctttctgtagaaatggcggaagacaaactaacatttttaaagcgctctcatttagctctgatgagtactacacccctnatattcttctgatactaaaataattttcctagtgtagtctaaacttttttaaaaagacatgtaatccgcggagttagtaactcaaaacgagtgcatctnggaagtatcgcagccgttnctggatnaaattcccagcttgctngcttgctnagccggggggcggtnaaaaaaacatctgcagcccnggggnaaaaaccttcgcattgttcttacgtgtttacgttattttatttccctnnagcaaggcnggganttggggactcgaaatggtacagttgggctggggatcgcccttgttacataaaagncgtccagaagagggacggttacaggcnggganctccaaaggtcagtccctgccatt

SEQ ID NO: 602 - DNA, 826 bp, Homo sapien
  misc_feature (1)...(826): n = A,T,C or G
cggggggnnttacgtctctctggacgcttttattgtaccagggcgatcccagcccaactgtaccattcgagtccctactcctgccttgctctagggaaataaaataacgtaaacacgtaagaacaatgcgaaagcgttttcttccctaggctgcagattgtcttcttcaccgcccctgcttagctagctagctagctgggaatttaatccagaaacggcttgcgatacctcctagatgcactcgttttgagttacaaactccgcggattacatgtctttttaaaaaagtttagactacactagggaaaattattttagtatcagaagaatatcagggggtgtagtactcatcagagctnaatgagagcgctttaaaaatgttagtttgtcttccgccatttctacagaaagctgcaatttcaggttttcancctaataggtgatatntaagaaaaaaaaaacaatcgcanatagcccactgcttttacaaatcatttttctcttctaggtatagcctgtcaggtggcctaatgtatttttgacatctctaggaattttaatagaccagaaatgggtgccagagatatgcctgcactaatcttaagtggggatttatgtatttctcaancaagtgattaaagcaaaactaggcacgaatgaaatcaagatctttaggccagaaatcatgaananttttanaattattttangaatctgtggcttctcttcttaaaatngaaaaaaaaattgtttaaacccanaaggtctgaatacccaagcnccctgaacnanagaacaangccggagcaccccctcccaaatcccc

SEQ ID NO: 603 - DNA, 817 bp, Homo sapien
  misc_feature (1)...(817): n = A,T,C or G
nnangacttttgtggtnttatacaattnttttttctatttctatgaagagaaagccacagagtcctaaaataattctaaaactcatcatgactttcttgcctaaaagatcttgatttcaatcgtgcctagttttgctttaatcacttgcttgagaaatacataaatccccacttaagattagtgcaggcatatctctggcacccatttctggttctattaaaattcctagagatgtcaaaaattacattaggccacctgacaggctatacctagaagagaaaaaatgatttgtaaaagcagtggggctatttgcgattgctttttttttttcttaaatatcacctattaggttgaaaacctgaaattgcagctttctgtagaaatggcggaagacaaactaacatttttaaagcgctctcatttagctctgatgagtactacacccctgatattcttctgatactaaaataattttcctagtgtagtctaaacttttttaaaaagacatgtaatccgcggagtttgtaactcaaaacgagtgcatctaggaggtatcgcaagccgtttctggattaaattcccagctagcttgcttgcttagcaggggcgggnaaanaagacatctgcagcctagggaagaaaacctttcgcattgttcttacgtgtttacgttattttatttcctanaacaaggcngaattgggactcgaatggttcagttggggtgggggatcccctggtncataaaangtcanaaaganggtacaggcggaacnccaagggtcgtcctgcatttanactcggaattttggtgcc

SEQ ID NO: 604 - DNA, 694 bp, Homo sapien
  misc_feature (1)...(694): n = A,T,C or G
cttttcaaatcatttttnctcttctaggtatancctgtcaggtggcctaatgtaatttttgacatctctangaattttaatagaaccagaaatgggtgccagagatatgcctgcactaatcttaagtggggatttatgtatttctcaagcaagtgattaaagcaaaactaggcacgattgaaatcaagatcttttaggcaanaaagtcatgatgagttttagaattattttaggactctgtggctttctcttcatagaaatagaaaaaaaaattgtataaaaccacaaaaggtcctgaatagccaaagcaacactgancaaaaagaacanagcagggaagcaacacactaccngaattcaaattatactaccagggtgtagtaaccaaaacagcattctattggcataaaatagacaccaagaccaatggancagaataaagaaccccacaaataaatccatatatntaccgccanctgattatcaataacnaacaccaagaacatatnttaagggacntnctattcaataantagtgctggnaaaaactgggaaatccatatgcagaaanaatgaaactagacccctatccctcaccatacgcaaanntcaacttcggaatgggattacaaaacttaagacattccaacccaagaaactatnaaanctactattaagaaaacagatcncnccc

SEQ ID NO: 605 - DNA, 678 bp, Homo sapien
  misc_feature (1)...(678): n = A,T,C or G
taaaaatctagactacactaggaaattattttantatcagaagaatatcaggggtgtagtactcatcanagctaaatgagagcgctttaaaaatgttagtttgtcttccgccatttctacagaaagctgcaatttcaggttttcaacctaataggtgatatttaagaaaaaaaaaaagcaatcgcaaatagccccactgcttttacaaatcattttttctcttctaggtatagcctgtcaggtggcctaatgtaatttttgacatctctaggaattttaatagaaccagaaatgggtgccagagatatgcctgcactaatcttaagtggggatttatgtatttctcaagcaagtgattaaagcaaaactaggcacgattgaaatcaanatcttttaggcaagaaagtcatgatgagttttanaattattttaggactctgtggctttctcttcatagaaatagaaaaaaaaaattgtataaaaaccacaaaaggtcctgaatagcccaaagcaacactgaacaaaangaacaaagcaggaagcaacacactaccggaattcaattatactaccaaggtgtantaaccaaaacagcattctattgggcataaaatagaccaaagaccagtgggaaacagaataaagaancccaaaataaatcctatatttacngcccnc

SEQ ID NO: 606 - DNA, 263 bp, Homo sapien
  misc_feature (1)...(263): n = A,T,C or G
gtggggtcngcancagccaactcagcttcctttcgggctttgttagcagacggatcatcctctagtccactgtgntcaaattccattgtgtgggggccnctcgcctcggccanagatctgagtgancanacntgtccccactgaggtgccccacagcngnttgtnttcagcangggctnacaactcgaccggcagcgnanggctggcagaantgngcgcctnnctcattcctacgcngtnngccgcaggaaggangacaggcc

SEQ ID NO: 607 - DNA, 22 bp, Artificial Sequence
  Primer
ccatgtgggtcccggttgtctt

SEQ ID NO: 608 - DNA, 22 bp, Artificial Sequence
  Primer
gataggggtgctcaggggttgg

SEQ ID NO: 609 - DNA, 40 bp, Artificial Sequence
  Primer
gctggacagggggcaaaagctggggcagtgaaccatgtgc

SEQ ID NO: 610 - DNA, 27 bp, Artificial Sequence
  Primer
ccttgtccagatagcccagtagctgac

SEQ ID NO: 611 - DNA, 46 bp, Artificial Sequence
  Primer
gatagagaaaaccgtccaggccagtattgtgggaggctgggagtgc

SEQ ID NO: 612 - DNA, 40 bp, Artificial Sequence
  Primer
gcacatggttcactgccccagcttttgccccctgtccagc

SEQ ID NO: 613 - DNA, 38 bp, Artificial Sequence
  Primer
gccgctcgagttagaattcggggttggccacgatggtg

SEQ ID NO: 614 - DNA, 53 bp, Artificial Sequence
  Primer
cggcgggcatatgcatcaccatcaccatcacatcataaacggcgaggactgca

SEQ ID NO: 615 - DNA, 46 bp, Artificial Sequence
  Primer
gcactcccagcctcccacaatactggcctggacggttttctctatc

SEQ ID NO: 616 - DNA, 1350 bp, Homo sapien
atgcatcaccatcaccatcacatcataaacggcgaggactgcagcccgcactcgcagccctggcaggcggcactggtcatggaaaacgaattgttctgctcgggcgtcctggtgcatccgcagtgggtgctgtcagccgcacactgtttccagaactcctacaccatcgggctgggcctgcacagtcttgaggccgaccaagagccagggagccagatggtggaggccagcctctccgtacggcacccagagtacaacagacccttgctcgctaacgacctcatgctcatcaagttggacgaatccgtgtccgagtctgacaccatccggagcatcagcattgcttcgcagtgccctaccgcggggaactcttgcctcgtttctggctggggtctgctggcgaacggcagaatgcctaccgtgctgcagtgcgtgaacgtgtcggtggtgtctgaggaggtctgcagtaagctctatgacccgctgtaccaccccagcatgttctgcgccggcggagggcaagaccagaaggactcctgcaacggtgactctggggggcccctgatctgcaacgggtacttgcagggccttgtgtctttcggaaaagccccgtgtggccaagttggcgtgccaggtgtctacaccaacctctgcaaattcactgagtggatagagaaaaccgtccaggccagtattgtgggaggctgggagtgcgagaagcattcccaaccctggcaggtgcttgtggcctctcgtggcagggcagtctgcggcggtgttctggtgcacccccagtgggtcctcacagctgcccactgcatcaggaacaaaagcgtgatcttgctgggtcggcacagcctgtttcatcctgaagacacaggccaggtatttcaggtcagccacagcttcccacacccgctctacgatatgagcctcctgaagaatcgattcctcaggccaggtgatgactccagccacgacctcatgctgctccgcctgtcagagcctgccgagctcacggatgctgtgaaggtcatggacctgcccacccaggagccagcactggggaccacctgctacgcctcaggctggggcagcattgaaccagaggagttcttgaccccaaagaaacttcagtgtgtggacctccatgttatttccaatgacgtgtgtgcgcaagttcaccctcagaaggtgaccaagttcatgctgtgtgctggacgctggacagggggcaaaagctggggcagtgaaccatgtgccctgcccgaaaggccttccctgtacaccaaggtggtgcattaccggaagtggatcaaggacaccatcgtggccaaccccgaattctaa

SEQ ID NO: 617 - protein, 449 aa, Homo sapien [sequence omitted]

SEQ ID NO: 618 - DNA, 385 bp, Homo sapien
  misc_feature (1)...(385): n = A,T,C or G
ctgtgctgagaaccaaaagctatgancactgcttttccaaatgtccataanaccaacatttttatcactaccaccatcacctgggagctcnttagaaagctagtctcccgggcaccaccctggcctactgaacctaatgtgcatttaacaagattnacgtngaaatctgcaaagcacaggggcngataacagtaccacctgntctggttcctanccccangacccttacagtctaactgggacacaagggcttnaaatcaaattgcctatcattaagatatacaangancntgagaaactgctncacttatntattaaggngctctaagacttagaaacnaaangcantgctgagangattcaaatatgangggggncactttnc

SEQ ID NO: 619 - DNA, 869 bp, Homo sapien
  misc_feature (1)...(869): n = A,T,C or G
gatatcccgggaattcgcggccgcgtcgacctctacttgtttagacataaatgcagtctagcattaaagatcctttaaaaaaatgttttcccaatggttaaaagacaagctcaaataaatgaactctcatacatatgccaaaattgatgagtagataaatatttcagtaggtagttactagctttctgtgtatgagtaaacatatgggagaaatttaaaacactaaagtagactcaatgaaagcatagtatcctatgtattcgtttttcagaaatgtctaatgaaggaaggaaacaatgaatgaatgcccttattcctcttagagtgctgggacatggttttgcctgaaaacttcatgtgaattttatattttgctacacattacacccatcttagacttatacgtataagacataaggcatatcttatgtcttacatgtataataatctaagcagaacaaaaaataacgaaatattttcttccccaaatttttgagacagatggattttccggaaagatgtgtttagcttttaatcctgtggttttgtgtaccacctggcacactagagtgttgctctaattcagtgagttgtaactctgggtgaacagtggaaatactagggtacattttaaaaatgctaatgctcgggcctcgctgaagaccaaattaattggaatctctgngggnggnattgatctttttataatctttctanangattctaatgggcttccagggatgaaaaccnctgntggagctnggaaccttcctttagtttggagaaaccccgatgagggtntnttaggcnccgcctntttttggcctgggcttccccccttatnntnttttggaanggnccnaattttt

SEQ ID NO: 620 - DNA, 339 bp, Homo sapien
  misc_feature (1)...(339): n = A,T,C or G
gngcgggcctcnccgtgcttgctctcgctgccgacgctctttttccaccagctgtagganaagcccgaagaccactggtcccccgggtagcccaagtaccactggtcctcctggctcctgacgctncgggtcttcctcgtggcgtagactgccagcttcggagacccctcagcccctccccgcttttctccaccccaggaggccatcagtagcgagctactgcctcggccacaacctcccagcangatagcccgcggtttccaatctgcgaaaggaggaccgccnagcccgaaatgccnagcccagcnatcactgccacgccgagccnagcgctcgtgc

SEQ ID NO: 621 - DNA, 267 bp, Homo sapien
  misc_feature (1)...(267): n = A,T,C or G
ggggngcatggtcccnggtagccaagtacatggtcctcctggctcctgacgctacgggtcttcctcgtggcgtagactgccagcttcggagacccctcagcccctccccgcttttctccaccccaggaggccatcagtagcgagctactgcctcggccacaacctcccagcaggatngcccgcggtttccaatctgcgaaaggaggaccgccnagccagaaatgccnagccnagcgatcactgccacgccnagccnagcgctcgtgc

SEQ ID NO: 622 - DNA, 847 bp, Homo sapien
  misc_feature (1)...(847): n = A,T,C or G
cttangntgtcgactgacgtcatgcatganttaaagcagaggtttggtgaaatttatgaaaaatacaaaattccggcttgtcctgaggaagagccactacttgataactctacaagaggaacagatgtgaaggatattccctttaatttgacaaataacatacctggttgtgaggaagaagatgcatctgaaatatctgtctcagtggtattcgagacatttcctgaacaaaaagaacccagtctcaaaaatatcatccatccatactatcatccgtactctgggtcccaggaacatgtttgccagtcatcttctaagcttcatttacatgaaaataaattagactgcgacaatgataacaaactaggcattggacatatttttagtacagataacaactttcataatgatgcaagcactaagaaagcaaggaacccagaagtggttacggttgaaatgaaagaagaccaagagtttgatttgcaaatgacaaaaaatatgaaccaaaatagtgacagtggcagtacaaataactataaaagcctgaaacctaaattagaaaatctgagttctttaccaccagattctgacagaacatcaggaagtatatctacatgaagaattacagcaagacatgccaaaagtttaagaatgangtcaacacattagaaanaaganttctgggctttgaagaaagaaaatgttccacttcataaagaaggttgaaagaagaatgggagagcccngaantttttgcccngaaattttcgggaaccctactggatgggtcnactggttggccatgaatgaataatggactaatcnnccaattcctngggaagggaat

SEQ ID NO: 623 - DNA, 681 bp, Homo sapien
  misc_feature (1)...(681): n = A,T,C or G
aaaactgtactcgcgcgctgcatgtcgacactagtggatccaaagaatcggcacgagcgaaaangctcangcagcccggctggccgccgccgctcctccccccaggaaagccaangtggangctgatgtggctgcangagctcgtttcacagcccctcangtgganctggttgggccgcggctgccangggcggaagtgggtgtccccangtctcagccccaaggctgcccctcacaaagcactggtggtttgcctccactgccaccttgggctccgaacccgctcccctgctgtggangcccaccgtgggaatccaggtccccaggtggactgcctgccttgccctcactgcccactctgcccacacttccctgcctaganaccgggaaggggctgtgtcggtantggtgcccacctggatgtggcagcaccgactgtgggggtggacctggccttgccgggtgcaaaagtgggggcccngggaaaagcacctgaagtggccctgaaaaatccccccttaattttnccccaatttggggctcnaacaaaaggaaattgctgaagccaanggtaccaaggtcacccctaaggccagggtgaaaaggtcccaaaattccaatncccaccntttgggcttncctcttggaaccccggccccctctcntgaanttttaaaaaan

SEQ ID NO: 624 - DNA, 661 bp, Homo sapien
  misc_feature (1)...(661): n = A,T,C or G
attggtcttactgtaccaccgggtggaaatcgatggccgcggcgtctaaatatccgattttttttttttttcctcttctgactgtccatggacaaatgaaactaacttaatctaactaaaaaacacaactatattttgaagattttctatctgcactcaaggacactttccacncggttgttgttaccttttggtcttgtctctgaacatgaaattnatctcaagggattngatttctggacctcctattcctgctatgggtttgatatttcttgggctccagggccactgttgcattgggntgacagntacctcctagcccatancctcctatcttgggaaacaaacctaacaactacgtgtaccttccatagatctctgattgagtctcagtatncgcttgctcatgggcgattcacttgaatccgtnattggtgccaacaatcctgactcatgggnnaatggatcctatcacgttcccctgattngcaacccctgtatacatanatctaatcgcatagaatctagcntnggntatgcgcggctacgctatcagggnttgntaactatngcatggctacgaancctgatcatgatcnagggtcatggactcttatcaggggggttgggccgngcttctttttcnnaccttggtaaaacc

SEQ ID NO: 625 - DNA, 181 bp, Homo sapien
gcaacaatcagatcatgttaaagtaaatctccattgccctggatcacttcaggatttaattgtccaaggagagcagggttctcctgtgaaaaaaaggtggggaaatgtttgagagtaaaaaatacaaaattcaaccggtcgaaaatacaccactccattcagtgctctacccccataagcc

SEQ ID NO: 626 - DNA, 181 bp, Homo sapien; identical to SEQ ID NO: 625

SEQ ID NO: 627 - DNA, 813 bp, Homo sapien
  misc_feature (1)...(813): n = A,T,C or G
accaagctggagctcgcgcgcctgcaggtcgacactagtggatccaaagtgaacgtgaaggtgagcagaggagaacttgcgatggcaaagttaaaaacaagaggagatgatggtcttggtgtggcacaggatgttaaaaaaattctcctgtccttaaggagttactgctatttgagtaatgtgccacttccctacatagccttctatgcagaaatgctatatttccacttcacaacccagaacgtgcattttattttacatttagaggaggaacaaacaaccagaaggcaaaaactggtgcattattttttgcaattctcttggaaagagttcgtttttaacttctgctcagacagcacacaactactgggaatatattttaatttcaaatctgatgtgtgacatctggtaactcatttattgctaatgaagttttcacaggaagcagcagtcaccagtagctcatcttatttttcagttggcaaagtgttgtttaccttttattggcctgcatcggtgtctcttatcacaggatatttaattagaaaacgcaagtagcctaacatagaanagaaatggagtggtagataatagtagatagaatggctaaatatttttattacagtgatgtaatatcactgnaatttatggttaaaaattatgtaatactcaaaaggaattctcagactggcgaaacagctggncaacagctntcacagggctttnanctcctnttgagctttccccctgntggactttagtcttccttttacncccgnagttnccattnnttaccaattgtnccgggaaana

SEQ ID NO: 628 - DNA, 646 bp, Homo sapien
  misc_feature (1)...(646): n = A,T,C or G
tttgggnggnggtgtctcntttgggtggactttttgggtcgtagggccccaaggccgttaatcccgtaataacggaagacgaagaagagtcagaagagtgcttctataaggatcgggacgagactaccttagaggaataaaggaaaaaagcagaggaggaagagtggtagaaggagtcagaagaaacccacacgtcgttctgaacctggagccttatcaaaaaggtctagataaacgatagcgatctcgatatcgagctcaagaggtaggtttagagacttctcgtcctcgagagcgaaatggaagatctcgacgacgataagaagttaaagtgtagagggtgcttgaggagcgcgtggaaggattctgcggagggacccatcgacgtagagacttgaaggcctactaaggtccacaagaagcccggctctttctccgaatggtcggagcgtacagtatgcgacgtcgatcggcagacaagctggcggtagactcgaagtgttcgggcgaatcgacttataatagtcgcgcgctagtaacgtaggaacacgaagagtagtcgaaagaaaacgtttagtgagggaaaagattagggaaaaaggagaggcttaataactaagacacttggagcctaggccaacgcgaa

SEQ ID NO: 629 - DNA, 617 bp, Homo sapien
  misc_feature (1)...(617): n = A,T,C or G
gcccccncccccctcctngggcttatngggacagacccacgtagtactctaaatcttctcctacgccggacaacggaccctataccaattcgaatcttggacactccgaccgccggattctcttcccctttcggcttcccctttctgtcggtacccctccctagtcgtctcctacaccttcgtaccgtcgatatatagtcgccgcggactagcctatttaggtgtcctagactcgttattgatccactcattagtctagtactatgcgtcacgtatcttagttgcctaagagggagattaaatcctccacaagttccgacgaattcctggactctcgtactagcaaactttcttatgaggcttccttgtatatcttctggatgtttctcgtgtcccggtcctccgctactactagagctccttgccctatctctagaagtagaggactctcgggttcgttctccaaatctagcgctagagctatcgctacccgctcgattcccccagcggaatcttgaaacctgaggtagtacacaaaccctccncatcttccctcggttgctccttcttctcatccccccttcccgccttctcgggaangaatctactttancttc

SEQ ID NO: 630 - DNA, 644 bp, Homo sapien
  misc_feature (1)...(644): n = A,T,C or G
cnntcggcntgggttttnttctgagnnncccccccccccccccccccaaacttacacccaccaaacactttccgccccctacctaggagacattagaagggtttaggcttcggcgtatagtaaagtcctctacctcggaagtagagaattcggtatttaaattcagggttagaggctcgctcgttagatttatagtttaggtttagaatcggaaaccttcgatcttccttagaagggtaataagtgaggccctaaatccgtctaaccaaggcgttaaggtccgtacctaaacctagtcttatcttctatcaggcgcaccaatataggtaggttctactttcgtataggccttaaggaatagttcggtagttatcgaaggcactcctctctaggctaggcttttctcagtcttagtactccgggaccgtcgtcgcanaaatatcgatggacggtaggtatctccgcgttacgcgtcgggctagggatatagagcgaattatcggcgagaggcggtcgctangaatcggtatcaatatgntgttctttaccctacggatatcggcagaaaacataaaaccttctnaccanggataagggattatcggacccctaaaataacagtaacatttagantactagtaccc

SEQ ID NO: 631 - DNA, 526 bp, Homo sapien
  misc_feature (1)...(526): n = A,T,C or G
ccntcggcttgggtttttttctgagccccccccccccccccccccccccccccccccggccccatagccccaccggncccacccaaattttaacaaaataaatntacctatcgntcacctatcccncgtatcgngtaggtcggtaccggtaccggngatcncnacgattnttcgggtcgtcncccttaanacggncccgtagccnccggaanaaatactacgagngactctaatntagcaanacccgccgtcnattantagcatccttagtcttccaatgncgnggattnngaatccttnnaagttatcgggtagaacgggtcccggtcccccgccctctttncaattaacgccgggtacaaantcggtttctaaattccncacgaatttngncggcaacattcncgggnccttattanccntttccaaccccgatacncnagctcgatcgggctttancgaatccggggtcncccccgangantccgggtcctttgagtngctctaggacggttacgacggagga

SEQ ID NO: 632 - DNA, 647 bp, Homo sapien
  misc_feature (1)...(647): n = A,T,C or G
tttgggnggcgggngctcatttgggtggactttttgggtcgtaggaacctggtatgaggggtgttttgagtttcttcttcgtcgtctctgggaggttcggtttcgattgagattcgggttcgtctttatcttacgaggcaccctgatattgttgcgctttggtttggttgtggagagttttgtcctactctagcgggtcatgcggatgatatgtagcctgcgtggcctgatagtgatgttgtgagcttgagaggggagttgtgggtgttgcgggcggagtaggaggggttggagcaccgggattgggagatatagaatcataagtgttaggtataggtcgattgagcgagttcgtggaattcgtgtggtcatcataattagagtgaggatgggctctatatttcttagaggacgcacggtcgtgattcggggtttgatgggtgttcttcttgtgggcacgattagcttgttcatgatggtaaggaccatactgtttcgaatgaggattcgtgtcttcggattgttgtggatattgtggnctanactatttagtgtaagccggaggtggtttgccgtggtggagtatccgannttcattcgganggtatgcgtgcggagcggtccttgtagacattccggaaaaatgg

SEQ ID NO: 633 - DNA, 630 bp, Homo sapien
  misc_feature (1)...(630): n = A,T,C or G
tccttcggcttgggtttttttctgacccccccccccccccccccctcggaaggcctctaggctcccacccgtctctctaatcctcaggaaccgatccacccaaccaacttactaatgtcctacagtaaacacccgagaatataaacccacacctaggcctccaatcctaccagggaagcaagaagccgtagtctagcgtattacgaacccgagatagagacggagatacttagttttattctctcggaataggaaagacgactggggagggaatataggctagcgcggggataggggctatggcggatatgggggcgggtcgctctcttattcttctataccacgtcaataggaatgtagatatacctagatgttcccgtagaaagagacgttagaggtctccgaagctataaaggagaggcgcgaagaaacttcgtactctagctttatataggtagtcgctctagtcccataagcgacgagagatctactagatttcggtatcgccgtcgtatgtattcgaaatagtcttcttccccttttcgatctcctctctatactacatggngattatagtcntaagatagtcaggatattaggatattagttatatgacgttcgacgggacgg

SEQ ID NO: 634 - DNA, 647 bp, Homo sapien
  misc_feature (1)...(647): n = A,T,C or G
ccntcggcttgggtttttttctgacccccccccccccccccctccactaagancttaacccaaccctatagtttactcgtataggggaatcgaggagaaataggaacgaagagcgggtgataaagagaaagtactttcctttatatgttaagagcttagcgtaatgactttcgttatatggctagttgattttatccggcgttatagggcttagttctggttatctcgggtctaattcccttagtatgctcgggagtttaacgaggtcacgggatagcgcgtaccctttctaaggttcttggaaagctattcgttatttatcgcgattctcgaggtcgaaaggatcaaggatcttcccttttactaccctagtcgggttagcggtcggtcaaaactagtgtagtacctttacctcctcgaaagttatagtcgaaacaacgtattagtcgaaattatagcggatagatcgagacggttctttctcgggttctcagccggtaatccctctatttgggggtcttctccctcttcccctttgtcttccgccttagcttccaaggttcctcggaagcgaggggttctacttaagtcgntagcgttccttataaaccncctacaggcagacccccttgtaaacggctcggggt

SEQ ID NO: 635 - DNA, 645 bp, Homo sapien
  misc_feature (1)...(645): n = A,T,C or G
ccttcggcttgggtttttttctgagccccccccccccccccccgaaactcgccttaccctagatacccaaagaatagttccactcaacttcgtctaagtaaaactctagaacttccaaacataaaagacttcgcgcggttagctacacagcctacgggaatctcacgaatcccgattcaagtcccactctcgaccacaccccggtatcgtcgttttcccataccaatgtcgaaaaataaaataaaatccagtcaagccccacggtaagcgggggtagggctaggcgaagaggcaggaaccgttcgaggccgggggctttcaaaatacaaaacaactacttaaagtttaccccttctaaagtcgggggcaacggttaaagcacgcctctaaagtactactcgtttcgagaaggggtagtcatctcccgcatagagactctcgcgtatatcaactcgcatcgcttctagcattccgacggtcgcccgcggctacatatcttgcggattagctccgagggactatagggttaattagtctagtaaattctcttagaggatagtcggggtcgtagttaggcagtacgaggggacatggnctgcgtcgtgctctaccttgacagcatactcttataaacatctttttcct

SEQ ID NO: 636 - DNA, 643 bp, Homo sapien
  misc_feature (1)...(643): n = A,T,C or G
ccttcggcttgggtttttttctgacccccccccccccccccctagcggaaaacaatccccaccgagattttattaatcgtaaaactcgccttcggtaccaagtcttcctccttcccgtaacctggctccctcctagnggctttacgaacgtccctcctcttcttacggctcggaagtggttacggttaaatccggaggnggggctaacgaatccaaggctaactcctcttanagtttgttgtccncncgtttagtaaggatccgtggagggcgagtatttgncccccggcctttattntatagttccctagtacgataaagntaccggctatcctattacagcggataaaagttatttanagggccgacgtcnccgctagacaggctacagctagnggaggtaccgcctccgactantccgttgnttccgacaaggnagtttcggttaactccacaaactcctccgccgactctanggtggggacggcagttcccncgtttagtgtgcgttatagagaagggcatttgagttggacgttacnttttaacataggttattccgtttaggttcttgcgggcccgtgggggtagtncnccggcgcgttnntatcggcgattttccgcagtttccgtttccggntnt

SEQ ID NO: 637 - DNA, 631 bp, Homo sapien
  misc_feature (1)...(631): n = A,T,C or G
gggttntctcatttgggtggactttttgggtcgtaggaaccggtatgnaggagtaggagtcgctgggaagactagaagttagctacggacgattagtgtgattccactcttaataacgagtaatcgtttacgtcgggttggtgtttcggggttttggagagtaagcgtagttgtggagtttcgcatataggtccccttacttcggcgatctcgtcttctgtcggttaggttattattgttcatccttcgcattagtagtagggttggtcggataaatcgatagctattctttagaattcgtagtcggagaattcgtgtacgaagtcctttaagttctttaagttcgcgagtaagacgtgtacggttattttgtcgtcgacgtaggtgtcgtttacgggagtttcgttttaggggtttacgtagaacgttattaagcacggtaatacgatagaggattacgcgacgtattcgtcttagaacgtcgatttttcgaaggcgcatttgttatcgaaggggagtccttggagaatcgagatattccaagaatattacggagattacagatcggaaggctcccgagatcggacgtattaccggtctcgcccgaaacgagtaggtatcntccggataa

SEQ ID NO: 638 - DNA, 606 bp, Homo sapien
  misc_feature (1)...(606): n = A,T,C or G
ccccccccccctcaaccatcnattccccacctcaacgcgaattacggtttcgaaagtcgacaataagtccggtcgagtagagggaatcaggggctggtanaaaggaccacgggcggaaaataccggtctccttccggggagcgacgtcggggaaagggaagagagcggtctagttcgtaggcaaacaggtcagaaaagttaaggttaaaggtcggaggggagaggatagctagtacgcttagttcggggctcgggcgcagggccactttcctctttcgcgttcctttactctgcttacgagttcaggctccggagttccgcgccggaggtcgtcgcgacgctaggaatggggactcgctcagtccccggttatccttcgggattctatgttttcgccgatagacggagaccgggtagtagggttccgtcgtaccgccactcgtcgccttgatccggcccgctccgcttaagggcgatgaaagattaggtattagggctctacgggacgaggcatagggcgggagaaggggggaggggtcgggggtcgaagggantaagaaatcgcantcgcgcggggtcggtagganccgaaatttttctcnncgt

SEQ ID NO: 639 - DNA, 592 bp, Homo sapien
  misc_feature (1)...(592): n = A,T,C or G
tccntcggcttgggtttttttctgagcccccccccccccccccccgggaacgagaaaacaatcccaccctaccgcggggagtgggttgnacgcttagttctagaatcctcggaatcgtcctccggcgttggtagttccggcgattccgagtatgccgaagtgtatcgctccgtctagaggttggtatctgtttatcgcgatgacgctattgactcggatgctttcgaagtagggggataggcgcatagatacgcctccgcggtgtcctctgaagtggccgcatccgtggacgcagcgtagacagctctggtggacgataacggcttctcgtactcctactccggctattatgttagagaggacttgtttctgaacggatataccattagcgaaggggtaccctccgctaacgcaggcgtttctaacagttcttccgggcgctccgaatttagattgacgcctccgcagcattgtgggatcctcttccgttagccctctttataggatttctcctccgccccgaaaganggctggtcgtccccggcangtatgtctagctcgaacgctttgttactcctttgttttcgaaana

SEQ ID NO: 640 - DNA, 637 bp, Homo sapien
  misc_feature (1)...(637): n = A,T,C or G
ctttgtggcggtggntgtctcatttgggtggactttttgggtcgtaggcttatccgggtngggctcccgaagtagcttaggatcgccggctagttccggtcccgcccgtcgaaagcgcggttcggcgggcggccccgcgttcgttcgcgggctttaccctcatagagtgccaggtctcggttcttacgggttcgtcggcgatagattttacggcgagaggtcggtatcttcgccgctttacgttcggtcggcatctacgcctagttcacaggtagtttatgcgccggagcgcgtgacggagaggttatacgggacgcggaagaaccgcctccaaatgactagtacaggctcgttcgggcgtagatctcctcgctcggtcggcggttcttacttctagggccgctctacggtttaaggcggtcgttagatcttagaaactatactcaagtttcagtcggaagaaaggaagtagagagaagggtaaacgattacctccggttctagccctttttactcgcataacgggagaacggggtccggctctcagatacgcctcgcgagacgtcgcgattcaactttaacctccgctagggcatccgtatacggttaacgcggtaaaagcgacctcggaaacctc

SEQ ID NO: 641 - DNA, 649 bp, Homo sapien
  misc_feature (1)...(649): n = A,T,C or G
ctntgtggcggtggttgtctcagtttgggtggatttttgggtcgtaggnaacctggtatgaggtctagtttcttcaacgattcttggttcagttacgcgaccctatccttatcttacaatgtcttctacatcaggttcatcaattaatatatcaattacacattaacgacggtgtgacgcaatatgagaaagtatacattaaggttattatatattattcgcttaaaaaggttcctgacatgggacaacttcacccaccattctagaagccccccctcctgtaggaccccctcgagttccccattatcttagttcagttttcattttttaaccaggagggtatcggtttttaataggtactattttgtcaaacttttcagaagctttatcttcaaatatacttgcaccatctgtactaggagcactaactattcgagtctattacagctcaacagaaaataattgaaattaaacaacctaagtatcgtccaccataaccccatcgggctctcaccccatttcttcataagttctagagcatcctgagctctttcctattacccttgatggtactcatggtctaataccccccgcagttataggtccttatggatcctatgctaccaccggtctaatcccttctatcacn

SEQ ID NO: 642 - DNA, 645 bp, Homo sapien
  misc_feature (1)...(645): n = A,T,C or G
tccttcggcttgggttttttttcgtcgcgggttactattatcgattgttacttgtaaaggcgatactcccaccgctcacgatattagacctgctcctctagaagcgaacggcgataggtctactcggccggcgaagacggcgaacgggtaggaggagccatatgcaaccctaacggagattataagtactgggaaaaatactagtattaaggtagcgggttaagataggtggagagacactattcacgagcataagcacttagaaggtcttctcgaggagaggtaggctacggactacgttccttcttcctctagcctcgagagggagtatagatgattcgcaaaagagaatccctcctatacgctggcataactagacgacgcgtcgtcgggaaatctcgccaaccctattgcgacctccaaaaggaagattgtcgtttcatagaacgctaatactccgggtcttcccgaatcatagccgcatatcggtaagaagacggtaaaatcgcgcgattctaacaagattctgtagacttaaggctaagcactagaagcgatctcgattccggatcttaagatcatactaatagttcggtcacaccagacgacgattagccactagaagccctactccgtngaaaccgg

SEQ ID NO: 643 - DNA, 586 bp, Homo sapien
  misc_feature (1)...(586): n = A,T,C or G
ctttgtggcggcggtgtctcatttgggtggatttttgggtcgtaggaacctggtatgcagggtccgcccggaattaaaagcgggatccccaaaacgnngnttcgcaagaagagaagaatcatagcgataganctttcatagtacaaaggtaactaagaggaaaataatgcagattcagaactagttgccaaattagaactcgattaggccaaggatccgagcctggcgctatcacttcgggacttaagctacggtagagcagtcggtcctgaagcatagctcccgtaggacgtaggaaactagtccggcacggaggacatactctcgagtctcggaacgtctatttagaatataaacgcattaacctcagaaggcgccgacgcggttactctctagggaactatttcattccttccggagctcccctatttttccaacacatataccggcaaaggaaaatcttntgtcctcggtctaaagagagggaaaaaaaacgatatctaggttcgggtttatccatttaaaaanatngacgcgactactccctttcaaagggagtttccccctaggnagagttcaacngaag

SEQ ID NO: 644 - DNA, 646 bp, Homo sapien
  misc_feature (1)...(646): n = A,T,C or G
ctttgtggcggtggttgtctcatttgggtggcatttttgggtcgtaggaacctggtatngagggctatttgacttgtttctcaaatcccatggtatggtgggtggcgtgcggggtggcggtcggttcggcgggggtgggggtcgtcctccaaaggagttgctagagggcttttagtggttttagggcgggaaggggttagagcggagagacgtcgtcgtggaagcttctggcggagcgcgagaaggtagttagcgccggttcggaagattctcagaattcgagaagaggtagtggggcgcggagagagagtttctaagtctaaacgtagaggtcgtcctagtcgggccgggagtagcttttaagctagaggtcgaggtcctcgtttaggctccgggctcttcgggcagtatcctctttctcgaggaacggagcgaccgacgtcgtagccggacccgtctatccgtacgtttagagatacgctcacctccacgggcgtatatgcccgtatacgtataaacgcgtaatatactcgcgcgtaaaacacgtatacactatatacacgcatcgtacggaccgtatagcgttatacgcgcgcgtatattaatttacacttatatacgcgttaacacgatatatcacacnccg

SEQ ID NO: 645 - DNA, 654 bp, Homo sapien
  misc_feature (1)...(654): n = A,T,C or G
nccntcggcttgggtttttttctgaccccccccccccccccccccggtcgacaacgtgcccaccgttgccatcccagcatagctggttcgttctgttttattcttagtagtttagttcgcctatagtccctcgtctatcgtctatcatttaaggaggcggggctcgctctttagggcgggtatcttaggtattcttctggtttcggctgccgtctcggagtctggtccttttgctttcctttcttggtcgaacttcgtgtttgatcgcgttgtttctttggggtcgtcatacctaagggccacttcgccaacaaacaagtttgtgtagtcgtttctattagggttcgctggccggcgctcttactggttggcgatttttaacgcgtttggttttaatttgcttcctcccctagggctcgctcggtcttctctctgttcgctgctctcgtccggcctttggtgcggggatagctccggctattancgtgccgtgtccgtgtggnttttgtccaatgtgaaggcctaggggtgcgggcttctttggccatggnttcccctcttgtganccttaggggtaacgantcgtaattnaaggtcgggggttggnatacgttntangggangcctgngtccgntattccttgttttggcctn

SEQ ID NO: 646 - DNA, 645 bp, Homo sapien
  misc_feature (1)...(645): n = A,T,C or G
tccttcggcttgggtttttttctgagcccccccccccccccccccacgccaagtacacagacccaccaaaaacaacgtcaacacaacttcgggtatacggaccttaagagagaccccgtagtagaccctaccacagccatccaatagtcaaacaacaagggcgcacccaatccatccatagagctatcaaacaacggaggggaaaggaaagagcagggtcaacttagcagagatcgaagtcggcactaattcctttcaagtactcgctcggcttgtagttcggggtaaagtccgctctcaaagggccaacgaggttttaaagcgacccccgtatcgagtcttcttcgtattcattaaggcgttaaaggtacgagacctagaagagagtagaattagcccaccaaatcgcctaaaccggcaaaaacgaccaaaagtcaaagacccttacaaatatcaccttaaaacgccaaccccaaaaacgcgatcagtaacgcacgtacctttcccacgcttttctttctttcactctccaaaacaaacccgaatatttagcgcaaaaaatatccgagggagaattagaagctattacccgaaaaaaaancggananggantaaatngtggggaatanacgtttggtttttctg

SEQ ID NO: 647 - DNA, 753 bp, Homo sapien
  misc_feature (1)...(753): n = A,T,C or G
accttacctggtaccgggccccccctcgagtttttttttttccaaatacaactcagattgtatacgaaaagctgataatacattgacttttgctgtttaaatcccttgagcctttgataatgattttttttgtgttaacaattgtagtatataaaatcggattcaccatccttctgatgccatattgattagtttgattttatggtgatgggatcattgtgtgttaactgtattaagaagaaatggatttgattgactttgcatccatttttatctgtgttactttcatgttttatttaaaagcatttctggaccagaataagttaagtggtataatttgctttttacacgtttatataattgaagttagcaatgtggcaaaatctctaatggaaataaaatgcttcagaatgatgacataaatctgagctatttcttgcctggagaacaagtgttattcataataatttaatagcttctgaggtgttttgttcatgtgatgaaggcttatccaccttgtatcaattcatgggctctgctttgtttaatgtagtcaggttgttaatacnagacttaagagtcatcctactgtgataagtggtgagtgaagattacatgtcttangaaaattatactgggaatatctctgacattaatgggtttaaatgttttaaggctaggggatgatgcaatgganaanatncttccaaangtttctggttgtttatatttgnggaagncatnaaganaccg

SEQ ID NO: 648 - DNA, 383 bp, Homo sapien
  misc_feature (1)...(383): n = A,T,C or G
gatatcccggggaaatgcggaggcctttnggcttacgtgtttaccgcgtagggcaaagccttgncaaattcccggccagcggagcggcgagggtggggactcacgggaagttaaacagcctcgtcggcgtcctcgaggctccaaaaccaggctctaggcggggacgactgcagccgttatggaggccaccgcggctacggccgcggctgaggcctccccaggtggagcggtggcctggaggggaatcttgatcctgggccagccacctgtcaagaggaggcggagcgtcatgcctctggaagactggatgaatattctccaggagcctgacgaaggcgaagaagtctttgcagaggaaattgaatgctgtctgatgctacaat

SEQ ID NO: 649 - DNA, 349 bp, Homo sapien
  misc_feature (1)...(349): n = A,T,C or G
cgattgtntacnagtcttagagtaagcttaagntcgntaccgagctcggatccactagtccagtgtggtgggaattccattgtgttgggtcactagtaaatggatttagctagacanagganatttaccctattccatttagcacagtgagganaggctanacagctaggatgcaataaaaaaaattttaatgagaaatgtgtgtggtagattaattctattaatctcaagttatagattaaaaaatttaagtaccncataaatgccatttgcctttgctaangntacatttttatgaanaangaccntgcatacnnaatganatactggactttnggnacttgangga

SEQ ID NO: 650 - DNA, 306 bp, Homo sapien
  misc_feature (1)...(306): n = A,T,C or G
cattgtgttgggagcatccttccatcagctcccatgagaaattctctgttgggtttaagcaatccccaaatatatcatattgacatgaatatatcatctcctcaatgtccagcattagcagacaagatgagtgctgaagatgatataactcctacctcttatgtaggctagaggtaaagtctggctctgctgactgtggggacataccgaaaaggaatgtgggttaatatcagangacctccctgcagatccganantcagggnctggactttctggganaggaagcnnaaagttatntctgaacc

SEQ ID NO: 651 - DNA, 769 bp, Homo sapien
  misc_feature (1)...(769): n = A,T,C or G
cattgtgttgggcagggtcatttctaaggcatgggctggaagcttttatttaaaactttacatgtcttagaagcactctggttgttgctaggcagacaattttacatctcttgctataccagttgcatgaagttcatcatgcatattggctgtggaaaaccttaacagcatcatgtcataaggtttcagtaaggtttaaatgaaatcatgtattaagcacttagtatagtgcaccttaaatgttagcttcaaaacaatgacaacctaactaatgttgaaagaagcttgtgtttgtaaattatgtcttattgaaagatgtcatcaaatcctgttatttctaatcccttaaagtctctcaatgtatttctttttgccatatccaatgacaggaccttagtttaagccagtggttctctcaacttctaatccagagatacctgggtgtccccaagaccttttcagagcatccttgatgtcaaaaccattttcataataatattaaaatattatttgctcattgtactcttattctctcccaaatattcagcgagttttccagaagctatataacatgtggtaacatcttatcactctgacgattaatagaatatgngnttttggattcttgngtttaaaattttctcactttggggttctaatatggnnacgattaatagatatggnctccatgaccaganggctttaaagcantcaataatttttaagagactaagnactatcctttaaagatngngaactccatcttaat

SEQ ID NO: 652 - DNA, 267 bp, Homo sapien
  misc_feature (1)...(267): n = A,T,C or G
nnangccctttaaccattgnggcctccacgcnntggcggccgctctacaactagnggatccgcnactctagnanaangattggctcttntgggntgggccggncgggctggggcgttaagcggggctgggcgcgcgccgnggttgnacnaggcgccgccgcccncacacncccggagcaccctcnttgcngccntnccccgctcaccccgcgcgcgccgntccgctttttccncacccanagcnctntttatctntgtctcctccgg

SEQ ID NO: 653 - DNA, 501 bp, Homo sapien
  misc_feature (1)...(501): n = A,T,C or G
cccnttnacccattgctggactccaccgcggtggcggccgctctanaactagtgggatccttncnatgagatgngcganggaggacnnatttgctatnctggatggggctgantcntntagctnctctagcancagatgggttatcgaggaagatgactccaangggctanantcctatgcncatcctaaaanncanctgctgtnttcagagtacgcgacacatcatcnctnatgcattgntgancaagacgggcangtgcttatcctcagcgangatgcccttaaccangagctcgaatggacntatcaccntanaggtacanntnccgcaccacacaccngcttgcnncctgacgctggactggatcncttaggccaccaatnccccgtttnccacatncctgggacnctananatactcganggggggcccggtanccaattcgccctaatactgagccttgntacgnacgctnactnggngtcctattanaacgttg

SEQ ID NO: 654 - DNA, 710 bp, Homo sapien
  misc_feature (1)...(710): n = A,T,C or G
gcgnctttancncatgctgggctccacgcggtggcggccgctctacactagtggatcccaacactgagtccaccacagnaaaactcancaccaggcagaccccacaactgcagaatccaggctgcaattcacagactaatcntctagacccacctcagtaccagatggtaccacacagctcaaggntttaggtttgcgtggtanactcaatctctatctttcaccactgccagcctgacttcagagatcctgngctctggacagtcctcagtggcaggcaactctcaggagcctcaggnttttggcacatcccagnaccagccagctgccacaggccctgaccttntancaacactgcccatgtattccagacttctancataccacagtgccatgctgattgcatctatagangctcaggtgcncctcaaanctgtgcctgctgcagnangccccacgtctctggcatgccccaatgccatgngtggnaacanttgacttctgggcatgntggaattccctaccactgancctgaccataggngggancccatttttttcgaggggggggcccggcccccaattccnccntatagngagncgtanttacgcgcnncttactnggccngtngtttaacaacgtcnntganctggggaaaacccctggnngcnacccaaattaaacngcnttgcannacatccccctttcg

SEQ ID NO: 655 - DNA, 202 bp, Homo sapien
  misc_feature (1)...(202): n = A,T,C or G
cccctttnccctttcancccccccgttttggcngccgccnacacctactncatccacccacantcgaccacccgagcttttttccgatcccancatcnatgcngattttntctntgcntgctgngcctgcacctttgntaggtcaagcctggcccatcttcgacaacttcctcatcaccaacgatgaggcatactctgacga

SEQ ID NO: 656 - DNA, 308 bp, Homo sapien
  misc_feature (1)...(308): n = A,T,C or G
gctgntgaaagaccacaccgaaaaactctnctttccgacttccacatgatgatcngcatgtggtggtgagagacttatcatgacgacatcgcttccnaccatcgcanccnctgcccaagcccattcatggaggcctgggnanttctgtgantgacntngacnctanacnctnccactgtntgctatccagacttgnttngaatatnttattggcnaaanacanttncggaatgctgtgnttgnncattgaangatctgatcactatgagagggtgaggacnncctgctngctggcantntntaacccn

SEQ ID NO: 657 - DNA, 696 bp, Homo sapien
  misc_feature (1)...(696): n = A,T,C or G
accntttccacaatnctgnnctccccgcggtggcggccgcgtcgaccagcaacctcagctgtgggtcttgttacagtaatgagttactgtaaggaaagtgtgacatttcgagcaatttgatttgtttaaaaactagagcagtttcagggttttccttgtaaatctgtcttatgtgtcttcaatgttctttcttgaggagtagagaaaggaattgttaggaatgatgcataaaccatggcttattttatctcgctgccacccataatcagagcagattcttgggactatgaccctcatggagacatgacaattgtgtgtgtggtgggtgggagaaaagagctgggaatttttagggtctagagggtccaatcaggactattttatggagctctgctcaccaactttaagtgagcaccaggggtgngaaagcgaatcttgggntcaaaanaacaatggnaaggggtaagttggtatnctgaactggccacttcggactcttatttaactgggtattctcanttaaggaggcnngggtggtcttggcttgtnaaggaaagcctgtgcaatggaatgactttaaaaccccccattaaaaaaaaaangntataaatcttgggtcttaanaangaagcctgggttctnttancccattttncccccgggaaggnaaatnttcttaggnaanggaagggaagg

SEQ ID NO: 658 - DNA, 698 bp, Homo sapien
  misc_feature (1)...(698): n = A,T,C or G
ctggactccccgcggtggcggccgctctagaactagtggatccgtgttggctcaattctcaaggctgttgctgtgcggcctgttccccacacgtgctgctcagctcaggcaagcaccgagcttgtgttgtttcatgctcagcgtggaggcccctcctccaggtcgctgctctgtggggttcccatacactcaggctcctaggaggagtccatttagaaagccagggtttttctcagagtcttagttccttgtgctgtcatccatttcacacgacttgggccctgctcggggcaacacagcaagagaaaagacagggaaaataagagagggaccttgcacacacacgctctggaccacagagccctgtgcccagctcctctgtcaatacaggtggaatctcgtgcaggatcgcaggggtctgtgatgccaccaaagagcaggccgggacagggttaggagagaaaggagagggaagtgggggtttctcctacgcactcttatttgcagagggaaaggcgggtttgtattggggttgtcggtctttgcacccacngcacagttgtgagacacccccatcctnagatcaaagccccacatacagcttggggaaaaacaaaacnaaacaaaacaaaaacagtaaacctccatgccanttgttgggnaagttttnaatttncttccccnacccancttgcttc

SEQ ID NO: 659 - DNA, 750 bp, Homo sapien
  misc_feature (1)...(750): n = A,T,C or G
ncaanctggnctccaccgcggtggcggccgctctagactagtggatcctcctcatgggcctggatatctctgaacatatgatgaacattgcttatgaaaaattatttgtangaaaattgtgaggcctaagaatgntattttcttttagtgatggtctttgtttgcttctgtaaggnacttgtgggcactcgtaagcttggatctctttaatctaataccagntttgagattttcttggccccatagatgaattaaaactggcgtacttcttgtttacaaganggataagtctcctagggtaagtcttttggggtcccaagtcaaaaagatgagggatttaccagttctctaaccttggtagccccagactccaaactttgccttctagtcccaagaggctatcaaaaagcaaaggccatcttccaccttcttttccanaacagcacacattccagacagtacttgaaagcaggaacctccttatcccttaaaaacctcttggaancatcttccctctcttgcttctactatgcttggcccacctancattcncntttttctggaaaccggaaaaancttntgacttnngttggctacattcagcttggccccctacaatntggtttccatctgccctaangaaattttaaagggcactttttttntggcccctgactttcnntttttagggctttcccccangctttgcccctttggttaaaggggttattttccttccccttttggaag

SEQ ID NO: 660 - DNA, 849 bp, Homo sapien
  misc_feature (1)...(849): n = A,T,C or G
tcggatccactagtccagtgtggtggaattcgcggcccgcgtcgacgggcagtagtggtatgcntntctaaatgttataattatttcagaattactctgccagaaagttatgatcatacatagaagagtttgtagctaactttgaaagtagtggaaagtggttttcatgtattgtttgggttaatttaattttgattatatttggtttttagttcaggtaatttttttgttgaaaacttcaaatgacaatttcttcatggttactaaagatcactcatgtggagtagtttcagatttttttctgaatacatgtattacttttagagatgtaaagatgtgaaattactaagagagaaacccatgtgatttgtttagtggatcaaaagtcggtagctcctttgatcctaagtgccactgatagttaaatagatactgaagctatgggcaggctggattgataagaaaaaaggagacagagaaatgggaaattgggaaagaactgtgcaaataggaaaaggagagagcaacagaacagaattagtaccacagtgccgaagtgccacctcaggtacttccatctcccatctcctgaagaattcagtaacagtttgcaaatggtcaacacaatcatttagtgatcctggttgatattttcaatactttctggggatttcttggctggnttcaaaagatgatgctgatagttttattgcccctgaaggtattctgaagnttancataatttattggtcagtaaaatatttgaataaaagnggangaaggaaaatctggcntcttattttgggatntcngcngggggaangaggatataattnaccccggccttgg

SEQ ID NO: 661 - DNA, 653 bp, Homo sapien
  misc_feature (1)...(653): n = A,T,C or G
aacttaagcttggtaccgagctcggatccctagtccagtgtggtggaattcgcggccgcgtcgacctccattcgtttcttgtccttttttttcattttttctcatgttctattcactttaggtttctaagataaatattataaaataatttttacttataaattattcactgataccctgtctttaacatgtgaaatgaattcaaaaggaatcttaatgagaaataatatactcatgatgtttaatagatttgatttcgaaataataagccctctgaagtcctaagttaaaaataaagcaacttgtttgataatttttcatcaagaatgtatctgagtctctgagtaattattagtaggaatattccattatcacaattacacagtataagctatttagtctaactttaccaaaaaagggagctacttcaacactgtgtgagacttttaatgggtttgcattgggtatgcactattagcaagataacctattttacagcagtgtttnttaacctttcccatttatttgaaaggcagctaagatatagtagttaatntaangggctgatgcatttatattacatgtaganaatgggagatacnaaagggagngggggganatnttttgnattcnnaagcttcnttgncaattaa

SEQ ID NO: 662 - DNA, 646 bp, Homo sapien
  misc_feature (1)...(646): n = A,T,C or G
aaacttaagcttggtacccgagctcggatccctagtccagtgtggtggaattcgcggccgcgtcgacccagggacaggcagccagngctggggtcaccagggtcccctcttgggccctccaanagcaacagtactggcaacagctgggatttgctgagcacagactctgcagcaggctcggttgagctctctgtgcctgttccttcataccatcctcacgcccatccatgagatgggtccagctgttttcagatgagaaaatggcacaggaagctggtaagtgacagtcagaaatgaatgctggcagcttantccttggacccaccgcagtgcaggaccttgctcaacagggatcacccttgtccgccacctgttcatgaggccacccagggtttgtgtggtcatttgtctcctttcatctgcttgccttcaaccagctgggtcattagggctggggaacccagaccccacacagtccttctcccagangccagacacannctncgccacagnaaggacttcagtccccgaancaaatgtncctgggcgtanaaactgnagggnccccaatccctggtggggtactgctttgcactggnggaattcacccctcattgnnaacctttccctnttnncacccctaaac

SEQ ID NO: 663 - DNA, 650 bp, Homo sapien
  misc_feature (1)...(650): n = A,T,C or G
aacttaagcttggtacccgagctcggatccctagtccagtgtggtggaattcgcggccgcgtcgacgtcgacgcggcgngccgtttcgacgcagttgatacatattattatatactacatnggttttctagaattaaaaaattaatgtgtagtgccagccctagatgtaagttacatatatcaactctatccaattttgtcagccataaaacttacctttttcacatacttctaactctaacaatgtgagaaatgtagatcattgcaattatacccacaaggcagatggctacatgcagaatggatagcagaatctagctacttacgctagccacatggtagacgttttttcctttgtttttgcaaaattgcaatataagttgcatatcgttagagtgaaaagatgtaaagaacccatagaagccagtgatgaaggacatttatattttcacctttacaaangaccttaaaattgcctatgtggagcagaaactggaggagggcnaanccatcngtaaaaaaaattttgntnctatttggatttgggcaccattattacctccccaggtncctttttgntttaacctttcttttaaaaaaaataattcntaatttttgggcaaaaaaaaacaaggtttttatttaaattt

SEQ ID NO: 664 - DNA, 678 bp, Homo sapien; identical to SEQ ID NO: 605
  misc_feature (1)...(678): n = A,T,C or G

SEQ ID NO: 665 - DNA, 694 bp, Homo sapien; identical to SEQ ID NO: 604
  misc_feature (1)...(694): n = A,T,C or G

SEQ ID NO: 666 - DNA, 705 bp, Homo sapien
  misc_feature (1)...(705): n = A,T,C or G
tttaaaaatttagatacactangaaaattattttagtatcagaagaatatcagggggtgtagtactcatcagagctaaatgagagcgctttaaaaatgttagtttgtcttccgccatttctacagaaagctgcaatttcaggttttcaacctaataggtgatatttaagaaaaaaaaaaagcaatcgcaaatagccccactgcttttacaaatcattttttctcttctaggtatagcctgtcaggtggcctaatgtaatttttgacatctctaggaattttaatagaaccagaaatgggtgccagagatatgcctgcactaatcttaagtggggatttatgtatttctcaagcaagtgattaaagcaaaactaggcacgattgaaatcaagatcttttaggcaagaaagtcatgatgagttttanaattattttaggactctgtggctttctcttcatagaaatagaaaaaaaaattgtataaaaccacaaaaggtcctgaatagcccaagcaacactgaacaaaaagaacaaagcaggaagcaacacactaccagaattcaaattatactaccaaggtgtagtaaccaaaacagcattctattgggcntaaaatagaccnaagaccaatggaacagaataaagaacccaaaataaatccatatttttacagccagctnattatcaataaaaacnccaagaacnt

SEQ ID NO: 667 - DNA, 817 bp, Homo sapien; identical to SEQ ID NO: 603
  misc_feature (1)...(817): n = A,T,C or G

SEQ ID NO: 668 - DNA, 826 bp, Homo sapien; identical to SEQ ID NO: 602
  misc_feature (1)...(826): n = A,T,C or G

SEQ ID NO: 669 - DNA, 547 bp, Homo sapien; identical to SEQ ID NO: 601
  misc_feature (1)...(547): n = A,T,C or G

SEQ ID NO: 670 - DNA, 232 bp, Homo sapien; identical to SEQ ID NO: 600
  misc_feature (1)...(232): n = A,T,C or G

SEQ ID NO: 671 - DNA, 214 bp, Homo sapien
  misc_feature (1)...(214): n = A,T,C or G
ctccccttccntccttcgctactncncattttcnnaaatttntttcgcntatgnggaaaaacacccacattnttcanctcgcacagaacangnnggggtgtgtaaaatgaagggcttccncnctttctcttattnaanaacactnaaanagggangggctaaaacccgcgngatntctacnctatcgcgggcgcttttggngttggctagaaga

SEQ ID NO: 672 - DNA, 328 bp, Homo sapien
  misc_feature (1)...(328): n = A,T,C or G
ngancagcggngtttaaacgggcctctagactcgaggagacncctgttggatggtggatcacanntcgntactactatacaggacagagtatcggganctcttggntgttggngcctgccaaccactgctnctgttaactgcgtatctgaagggactcggactggcttcagaagaactaccggctcgaatgnaccatggatgattcncnctagttgaaaaaaaactcaggcacatgtattgccactgatgactagcgccagactnctctcggctctntaacgagcccacatgncngtgtgncncccgtgctgnctccagaagaggttc

SEQ ID NO: 673 - DNA, 223 bp, Homo sapien
  misc_feature (1)...(223): n = A,T,C or G
gggggcaaagctggctagcgtttaaacttaagcttggtaccgagctcggatcccnnagacattgtgcatgaaaatgcaaattgagtgtggtctatantgccatcntcacctnctgncngctcaaaacaacngctttctgctgcaatgggtagggctcctnacncacggtcgcnnacggaggccnncttatcctcntcggtnnggatccctngaagcatnttct

SEQ ID NO: 674 - DNA, 256 bp, Homo sapien
  misc_feature (1)...(256): n = A,T,C or G
gnggggtcntngatgagcgcgcgtaatacnatcactntcnggcgngntgggtaccgggccccccctcnaagcggccgccctttttttnttttttttcatnacatgataanntctttnttctaaacagaccacaccactanagttcctttnctttngtacggaattgagttaaagtagagnatacaatgcagggcttcnnctctatttcacattccaggntggttcngnatggatcggccctgcctctccgatgggt

SEQ ID NO: 675 - DNA, 439 bp, Homo sapien
  misc_feature (1)...(439): n = A,T,C or G
nnactagtccagtgtggtggaattccattgtgttgggcttgtatgggtttttttgtctagttntttgggaaatgttngtgttactatnttttggatatnatatatgatatgtatggcccttctatgggctcctcanacngaactcaaccattttccacaaaaccnattcctcctttcccttcatgactgagtggtgttggtactatccnggaaactgggacattgtccttcacatctntcccttanctgcctngtccnattgatgtctttgagctntganatgtctttgttaactntctcctncntctgtactgccggcanaattaagcaccatntgtcacaaaaagtattgcgttaccttcacgnatctgttngttnccatncttgctgcttctccngnggaaaataggctnttctggcaaccgaacngaanaaatac

SEQ ID NO: 676 - DNA, 587 bp, Homo sapien
  misc_feature (1)...(587): n = A,T,C or G
nggnggcctnattaagcgcgcgtaatacnactcactntggggcgaattgggtaccgggnccccctcaagttnatntgccnaacctctcttttggaataacaaaaggtttaacacatatgtcctcatagggacgcgctttcacacnttcctgacngcttcatanacntcattnctatttctcctcagnacaagttnaggcngaaggtgaggcanacnttataatttccatttcacaaatncggaaagtgaggctcaaagggnttaaaaaataacctgatacaantcatagagccggtntctggaanaagcaggagcaaagtccaggcatcctgatccaagctnggtccactgccttccactctggagaggcttcatctccgacaaaggaagggacntgagtggctgganaatctcatgggataaagacctcagnatttcatgctcctggaaatcccatgggttgaacaacaggtntttggcccgtggttctntccctttgnccatcttttaaccttggggtaaatgatggcntctntnagcnttttttttnaaagagatngaaattgaatgattattngctcattggg

SEQ ID NO: 677 - DNA, 444 bp, Homo sapien
  misc_feature (1)...(444): n = A,T,C or G
gtggggcatnattaagcgcgcgtaatacgactcactataggggcgaantgggtaccgggcccccctcgaagcggccgccctttttttttttttttactgtccaaactntctatngatntagttgaactgtncaacgatttcatgaaattctatacacanagccttcaggtccagagagtaaaacaaatttaaatttnttcaccanattgnagcagncanaagcatccnatnatatccgactacaatgaatnatatgctnanggtanctnatttacccactntggggtctttanggtctgtcacaaactattttcgtaaacatcnntttaaanttnggtgaatggacctaatnccagataantctatttnatntaccctagcatncctgtggctnactttncgggctgtgttggcntacttttaggagaaaattggtataaatnn

SEQ ID NO: 678 - DNA, 670 bp, Homo sapien
  misc_feature (1)...(670): n = A,T,C or G
actagtccagtgtggtggaattccattgtgttgggagcagtttaaaaaaaaaaaagacnaaatatacnactcttgatnaaacataaaggtacagtggtctatgaggaanagaaaaggtacctnaggatgcaaaantacctaccacatgggaaccgttngtccacactcattccnnanaaaaccgagtcctctcanttncacacgtgtacgtttcagttgggaagtgcttgccattactccnaagcctagaaccttcacgtcctgaaggttctggaaggtttttcagattgcttaaganacgcngcccttccatattcntctccactacccnggggaacggaacaaatggagctgcgacngggaagcgtcccttcccntccgaacgctttctttcaaacctgcctgccttccnggcgaatggaccggaaggtttnctngcttcctttcancccnaattacttcctgngttgaaaattggcctgttggtttgcaaatgcnggaatttgtttactttcntcatgtcctgtgttgnncnaaccggctcncttgttgcctccctttngaaaggttttcatcaggccccgccctttctcttntaanngtcctaatccggncnggaccactcggggaaaattttttcttttcgaaaagccgccccntccgtccggct

SEQ ID NO: 679 - DNA, 449 bp, Homo sapien
  misc_feature (1)...(449): n = A,T,C or G
actagtccagtgtggtggaattccattgtgttgggagtaggtctactacancctacttcccctatcatanaagancttancaacnttcatgatccccccctcntannccttttcctcanctgcntcctagtcctgtttgtcctnttcctaacantcntaaganagatnactaatnctactatctctnacctccggaanctacaanacgtctggaactattcngaccccatgcanccncatnctccatcgtcctcccagcccctncccttcctttacnttactnaacgaaggtcgacgatccctcccntacctcccnnnccattgggncccaanggnactggacctcacgantacaccnactacggggngactaagnctgnaactccttacatatntccccgttacccccngaacncagcgaacngcnacaccttggacntcaagaanta

SEQ ID NO: 680 - DNA, 670 bp, Homo sapien
  misc_feature (1)...(670): n = A,T,C or G
tttcngtgtggtggaattcgcggccgcgtcgacgagaaganggaggagganaaggagaaggagaagaaggagaanaaggaggagaaggagaagaaggagaagaaatcatcatcatcatcatccactgtctngcaactatttaagtttgcnantcccttgaaaacaggtacttttgtttcaatgtttgggaccactnctgacnatgannagaanaccaataaatgcttgatnaatgaaaaanccactttttacctgttagaaccctgaggctaagagaantgatgtgactcgacttagttaccacaaactatgatcctagcatnaattggggcatctcaacacctcaactccctgtgcaagaacagattttcaatgtctactgatgattttaaatggattanttcctctctttacttcttaagggcatgaagntttatgaaacaaaactatncagttccagacgcttaacccacatagtgttaatagtcaccttcaacacacnactaaacccccaaaaaangntttttacggngtttcgacagttttcttttctttttgacttgnttaacacccnngacaactttgtnctntttccntgaatcacanctttcnaananccaatggtncggttttttctcnttcngggcccttcccttnttnaaaaccanat

SEQ ID NO: 681 - DNA, 494 bp, Homo sapien
  misc_feature (1)...(494): n = A,T,C or G
tcatggtgtccacagtctgatgtgagcgcattaaatttaaggatctccgcccttctccttaaaactcaggacttggcaatgancctaggaagcgcccctcccctccccanccanatccaagccccggaccgctgcgnctccagctgcgcctagtgaaaccgccgaattcgaattcacactcggngggccggcgaaggtgtgcgcgcccgcgggagcgccggggcnagcccgagggactgcaagccaanaanggaggcatgggtggcggggggcgccgtctgatccaggaaggagcggaggcgccgatcacacactcttnagacgccctgcccgcgcctggccagcgcgcagnctgcaggacgcgcggagcaggaactcgctggagtttgccaagccccangnctctggaaagtntgtagctccctttcggancgnctcttctggccctttgggacgggtgtgtcattgggcgggggtctgtataagggggggac

SEQ ID NO: 682 - DNA, 263 bp, Homo sapien
  misc_feature (1)...(263): n = A,T,C or G
tgatcattcaagcgntgngcgnataacgattgctnagcccaacctttcatagggtcgttcctttgggaatnggatgtctattgaatggcagggataggggcactcggcattcgcctctggtacagttttgcatatatatcctcatcgcgagcgagcgtaggggancgttaagtttggggaaatgccnccgcatgnccctnccggagcttaaacccccaacaatncccattttnaaaaaagntttnttanttaaaaaaaaaaac

SEQ ID NO: 683 - DNA, 255 bp, Homo sapien
  misc_feature (1)...(255): n = A,T,C or G
cttgcccggcatgcacagacntntttacggacacnctactccaagngagcctgnanctgtctacggtcaanctctaaggttngncantgccacanatggcatagtcccgagggcggtnantctggantgctctctgcacttgaacntaaagcgcntttcaaganaggnctaatngcctgcctcttgacaacnaacaancccacaccnacctangaccctntangcaaggactggattctgnaaatgcaatacaca

SEQ ID NO: 684 - DNA, 922 bp, Homo sapien
  misc_feature (1)...(922): n = A,T,C or G
acccttcatttcatgtgcttctattttcctacatcttttacatgactaagggattaatgaaatcacctcttcataatcatgaccataatttcatccaacaagtactcaagtttggtgttagcactttattaatgcttacgaattctctctctctccctctttctcttttccttagtccttgcacaataaggatttttgaatgtataatatcatcttaggtaagctttcatatggttttggcatatgaagcttatgactgtcataagccataccaagcctgtggagtatggcatgattttcattacataatccaatgaaaatagacttattttaaatccctaactttgtagttttaatttgtatttcactatcttgaaattaacagctagtacttatccatcacagcagtctcctactgacatgaagcaagttgttgaatgcagtagancatgaatgaaagcatttaatgttanacaaaaatgggtgatacccaagcattctgaattatttgcatcaaggaatgggacatgtacattagtggcatcatttctaccaatatgtgacttgaattgtttttttaaaaaaagganaatgantttctcaatttgctttaaaaaattttnaaaaagttcaatggcatgctgctttgtctggacttaatttattaacaattnttaanccttccttaaggacanaattttggtgttcaggatcnccctgaagggtcttatttttnatannattccaaacccaaaaggtggtttaaaatgggngggttccccccncnaaaatttggaccggcttttttatatttaaaaaanttnccntttgngtttgaaanctnaataccaattaagggggaattttacctnccagtgggaaaaaaaaacnctngccnttnaaaaaattcccnggagncaat

SEQ ID NO: 685 - DNA, 531 bp, Homo sapien
  misc_feature (1)...(531): n = A,T,C or G
tgaggctctgtaaaactgttcctctgctaggcatacttcatattctctatattaaactcatctttaattggcatggaagattcattgttccaaatctcagatgaagatcctatattggatgcaattaagcctggcagcgccctcaaaagacagtcttgtcactgctagccacagccaggacacagtaacagttccttctagtgacccnagaccataanaaatananatctaaagaattctgactccaaaggcattagcccattcctggtattgccaattatgatagaaaaaattgccaagctcctgggacatggaaatacactcagtacatttgagaactggagaactantttccaaaatagtatgaagacatganggtgattgtagatatntgagtttggagaanttgagggaaatcngattacacatgtttactacaagagatgttnataagtaaagaaggcctgatatacaatctaacagacnantgagataaatcttaantcacaactgacntcccttttggggcgg

SEQ ID NO: 686 - DNA, 336 bp, Homo sapien
  misc_feature (1)...(336): n = A,T,C or G
ggngncctnatgagcgcgcgtaatacgatcatatagggcgaattgggtaccgggcccccctcaagaacactacaagctatgtcctcttctcanagagccctgaanttttaacatattgaaagctctnatcttgccaaanaactccacttaacttcaaaacacaccctccacacacatcatgatcaactnagatcttactgaaccagaatcctnaatggcatacttcaggaacaggggtccanagaagcagttctcaaantgcagctnaaaaagaaactgaaaacccaattcatgcaanacctagggcttatttgagagcattttccagtgcagatt

SEQ ID NO: 687 - DNA, 271 bp, Homo sapien
  misc_feature (1)...(271): n = A,T,C or G
aatctgcactggaaaatgctctaaaataagccctaggtcttgcatgaattgggttttcagtttctttttaagctgcactttgagaactgcttctctggacccctgttcctgaagtatgccatttaggattctggttcagtaagatctcagttaatcatgatgtgtgtggagggtgtgttttgaagttnagtggagttctttggcaagatcagagctttcaatatgttnaaacttcagggctctctgagaagaggacatagcttgtagtgtt

SEQ ID NO: 688 - DNA, 740 bp, Homo sapien
  misc_feature (1)...(740): n = A,T,C or G
tgatgaagcgcgcgtnntacnactcactatnggggcgaantatgggtaccgggnccccctcgaagcggccgccctttttttntttttttgtgagagtttaaataaaatatttgagtttaatttaaagtttgagtttaattaaaatatatggcatatcccaagttgggctttgcanaaagaacacttctcaggaactgttagttggtgtaccaggaactcagaagggtcctgttattaaatatatttggaaaatgcatggattctctgaanatcnctctgcatgtgagcaacacttacatcncaaaccaaaattggcattgcatacatnaaccaatatttcccaaacatttctggttatggcccaccccctttgtgtantacttattgctgttttttggaaccctggggaaattacttaaaatattcagctggaaattacaggcgttacttttaagggancaagaattacagtgactcccaaaattgcaagtgttgattactatttaagaacccaagaatttgaaagaaattttgaaaagtgaaaacnggaaatnttaaatgacttctcaaattttgaaaactcnggnaaacatctccactttggtncccttcctttaaaaattggctaaaaattntttnttatncccaccccattggaantnccccccccctggaacaattggattcccctatttcctaaaaaacggccnccccccccggggngaacnccnacnttttgn

SEQ ID NO: 689 - DNA, 635 bp, Homo sapien
  misc_feature (1)...(635): n = A,T,C or G
actagtccagtgtggtggaattccattgtgttgggattacatatacttttagcaatttttaaagaagtgtacaaagttgagatgtttcctgagctctcatatatctganaatgtcattttacatctccgtcttcacctctcaaaacttctttcaattctttggctcttaatagtaatcaacacttgcactctggagtcactgtaattcttgctcctttacagctacncctgttatttccagctgaatatttttagttatttcccagggttccaaaaaacagcaataagtactacacaaagggggtgggccataaccagaaatgtttgggaaatactggctcatgtatgcaatgccaaatctggtttgcnattgtantgttgctcacatgcagagtgaatcttcaaanaatccatgcattttccaaatatatttaataacagggaaccttctganttcctggntacaccaactaacagttcctgaaaaatgttctttctgcaaaacccaacttggggatatgccatatattttaattaaactcaaactttaaattaaactncaattattttattttaaactcctcaaaaaaaaaaaaaaaaagggggggcccttccaanggggggnccggttcccc

SEQ ID NO: 690 - DNA, 3923 bp, Homo sapien
acagaagaaatagcaagtgccgagaagctggcatcagaaaaacagaggggagatttgtgtggctgcagccgagggagaccaggaagatctgcatggtgggaaggacctgatgatacagaggaattacaacacatatacttagtgtttcaatgaacaccaagataaataagtgaagagctagtccgctgtgagtctcctcagtgacacagggctggatcaccatcgacggcactttctgagtactcagtgcagcaaagaaagactacagacatctcaatggcaggggtgagaaataagaaaggctgctgactttaccatctgaggccacacatctgctgaaatggagataattaacatcactagaaacagcaagatgacaatataatgtctaagtagtgacatgtttttgcacatttccagcccctttaaatatccacacacacaggaagcacaaaaggaagcacagagatccctgggagaaatgcccggccgccatcttgggtcatcgatgagcctcgccctgtgcctggtcccgcttgtgagggaaggacattagaaaatgaattgatgtgttccttaaaggatgggcaggaaaacagatcctgttgtggatatttatttgaacgggattacagatttgaaatgaagtcacaaagtgagcattaccaatgagaggaaaacagacgagaaaatcttgatggcttcacaagacatgcaacaaacaaaatggaatactgtgatgacatgaggcagccaagctggggaggagataaccacggggcagagggtcaggattctggccctgctgcctaaactgtgcgttcataaccaaatcatttcatatttctaaccctcaaaacaaagctgttgtaatatctgatctctacggttccttctgggcccaacattctccatatatccagccacactcatttttaatatttagttcccagatctgtactgtgacctttctacactgtagaataacattactcattttgttcaaagacccttcgtgttgctgcctaatatgtagctgactgtttttcctaaggagtgttctggcccaggggatctgtgaacaggctgggaagcatctcaagatctttccagggttatacttactagcacacagcatgatcattacggagtgaattatctaatcaacatcatcctcagtgtctttgcccatactgaaattcatttcccacttttgtgcccattctcaagacctcaaaatgtcattccattaatatcacaggattaacttttttttttaacctggaagaattcaatgttacatgcagctatgggaatttaattacatattttgttttccagtgcaaagatgactaagtcctttatccctcccctttgtttgattttttttccagtataaagttaaaatgcttagccttgtactgaggctgtatacagcacagcctctccccatccctccagccttatctgtcatcaccatcaacccctcccataccacctaaacaaaatctaacttgtaattccttgaacatgtcaggacatacattattccttctgcctgagaagctcttccttgtctcttaaatctagaatgatgtaaagttttgaataagttgactatcttacttcatgcaaagaagggacacatatgagattcatcatcacatgagacagcaaatactaaaagtgtaatttgattataagagtttagataaatatatgaaatgcaagagccacagagggaatgtttatggggcacgtttgtaagcctgggatgtgaagcaaaggcagggaacctcatagtatcttatataatatacttcatttctctatctctatcacaatatccaacaagcttttcacagaattcatgcagtgcaaatccccaaaggtaacctttatccatttcatggtgagtgcgctttagaattttggcaaatcatactggtcacttatctcaactttgagatgtgtttgtccttgtagttaattgaaagaaatagggcactcttgtgagccactttagggttcactcctggcaataaagaatttacaaagagctactcaggaccagttgttaagagctctgtgtgtgtgtgtgtgtgtgtgtgagtgtacatgccaaagtgtgcctctctctcttgacccattatttcagacttaaaacaagcatgttttcaaatggcactatgagctgccaatgatgtatcaccaccatatctcattattctccagtaaatgtgataataatgtcatctgttaacataaaaaaagtttgacttcacaaaagcagctggaaatggacaaccacaatatgcataaatctaactcctaccatcagctacacactgcttgacatatattgttagaagcacctcgcatttgtgggttctcttaagcaaaatacttgcattaggtctcagctggggctgtgcatcaggcggtttgagaaatattcaattctcagcagaagccagaatttgaattccctcatcttttaggaatcatttaccaggtttggagaggattcagacagctcaggtgctttcactaatgtctctgaacttctgtccctctttgtgttcatggatagtccaataaataatgttatctttgaactgatgctcataggagagaatataagaactctgagtgatatcaacattagggattcaaagaaatattagatttaagctcacactggtcaaaaggaaccaagatacaaagaactctgagctgtcatcgtccccatctctgtgagccacaaccaacagcaggacccaacgcatgtctgagatccttaaatcaaggaaaccagtgtcatgagttgaattctcctattatggatgctagcttctggccatctctggctctcctcttgacacatattagcttctagcctttgcttccacgacttttatcttttctccaacacatcgcttaccaatcctctctctgctctgttgctttggacttccccacaagaatttcaacgactctcaagtcttttcttccatccccaccactaacctgaatgcctagacccttatttttattaatttccaatagatgctgcctatgggctatattgctttagatgaacattagatatttaaagctcaagaggttcaaaatccaactcattatcttctctttctttcacctccctgctcctctccctatattactgattgcactgaacagcatggtccccaatgtagccatgcaaatgagaaacccagtggctccttgtggtacatgcatgcaagactgctgaagccagaaggatgactgattacgcctcatgggtggaggggaccactcctgggccttcgtgattgtcaggagcaagacctgagatgctccctgccttcagtgtcctctgcatctcccctttctaatgaagatccatagaatttgctacatttgagaattccaattaggaactcacatgttttatctgccctatcaattttttaaacttgctgaaaattaagttttttcaaaatctgtccttgtaaattactttttcttacagtgtcttggcatactatatcaactttgattctttgttacaacttttcttactcttttatcaccaaagtggcttttattctctttattattattattttcttttactactatattacgttgttattattttgttctctatagtatcaatttatttgatttagtttcaatttatttttattgctgacttttaaaataagtgattcggggggtgggagaacaggggagggagagcattaggacaaatacctaatgcatgtgggacttaaaacctagatgatgggttgataggtgcagcaaaccactatggcacacgtatacctgtgtaacaaacctacacattctgcacatgtatcccagaacgtaaagtaaaatttaaaaaaaagtga

SEQ ID NO: 691 - DNA, 882 bp, Homo sapien
  misc_feature (1)...(882): n = A,T,C or G
ttactcactatagggctcgagcggccgctgaattctgctgcagtgagctgtgattatgtccctgcactccagcctggatgacagaacacgatcatttctctaaagacaaacaaaaaacataaaataaaactagtataaggatagaagcccagggttgatttaagtctgcggaaatcataaaccataggtcagacttctcattgatgaggtacttgtgggttagaatacaattaggtatatttggtctagaaaccaggatggaattagagaataaaagactgagcaatagcatgttatagtattagaaatactatagaaataggaaaagccctgattatgactttggagttctgatccaacatctgggattatttagatattttaaaggaaaacgatgacttttagctctcaggatgttagtttcctcaaccataaaatgaagagcctcgaaaagatttcgtttaccagattatttctgaagtcaattccagttctaaaattccatcactgngcactaaggcaaattgaattgaataaagtattgggnatgcataaaatactctatttttaaaaangaatagtaattatccattggnaacagacgcantcatccagncatctcctaccctgncccatgncntatgtaganatgtanctctaatcccttaacaaaccgattttgcaaaggagcttanccttggggtacttggtcanggcaactggtctactttnaagactcatcttcacttactgggcaccaaatncctaccattgcatcaaactggggttcccatncaaggcaaaccctgngaaatctttaatcccgaaattggcgcccaattttgnggggtttccnaaaagaatcntcccccccgaggggcc

SEQ ID NO: 692 - DNA, 235 bp, Homo sapien
  misc_feature (1)...(235): n = A,T,C or G
ccgcactngtaangnccgccagngngctgnaantccgctnagcncggatccactagtccattgatggtaaaagggtagcttactggnatgtccgnctgctccanganataatacncaggacttctcanagcacttaatatgttaatataaaactncgngaaaaaagatnttcnatgaancnttcctcttaggaggtcaggngagaatagtgttaatgncattaagganagaacga

SEQ ID NO: 693 - DNA, 383 bp, Homo sapien
  misc_feature (1)...(383): n = A,T,C or G
nttatgtaagaaatgtcatatatcttttattttctttaaatcaaaataaatatgactttgagcatcccatcccatgccccatcctatcagaatggtaggaacatcaacacaaataattagtaatgcaccgcatctacattcccatgctctctttacttcttcagcattgcctaaaggcataatacacctttaattaattaattcagcctcctaatgcacattaacaaagcccctgctagactctgtccataatggnaaacctgnatgatccttgatattaacantttaaggaatgctcatggattggttncagacttaaaaaattgagggggctgaanaaaatctaangganaaatcatggaagcatttgcacatattacata

SEQ ID NO: 694 - DNA, 204 bp, Homo sapien
tctcttggctggtcagcctgaagggtggtaatgactcaccaacgctactaatccttcttcactgtcccttatttttttccctcccaggctcataactcgaggttaaactctcttttatacaagaaccctgtctgatgaagcatcatttcagaattttaagtcaacttacaaatgtggtattattcacatctgagtacaaattta

SEQ ID NO: 695 - DNA, 670 bp, Homo sapien
  misc_feature (1)...(670): n = A,T,C or G
gcaccagcccaggtgctgtttcttcacttgagctccatgaccctccctgtgtggtgggttgaacggtgacctccaaaagatatgtccacctggaacctcagaataagatcttatttggaatagtctttgtagatgtcagtaaggtaaagatttggagatgagaccctcctggattagggtaggccctaggtccactggcaggtgtgcttctcagggtctgaaaggggaagacagggccacccagaggaggagacggaggcagagacagggccacccagaggaggagacggaggcagagacagggccacccagaggaggagacggaggcagagacaggggccacccanaggaggagacggaggcagagacagggccacccagaggaggagacggaggcagagacagggccacccaaaggaggagacggaggcagaanacaggcccccccaaagaaganaccggaggcanaaaacagggccacccanaggaggagacggaggcanaaacagggccaccccaaaggaggagacggaggcaaaacagggccacccaaaaggaggaagccggaaggaaaaaacagggcccccccaaaggaggaagncggagggcnaaaaanagggccccccccaaagngagaaaaccnggnaggcnanaaaaccnggggcccnnc

SEQ ID NO: 696 - DNA, 317 bp, Homo sapien
  misc_feature (1)...(317): n = A,T,C or G
tgacccgttntttctgcaaaggagagtggggaaggagggntgggaagacaaaagttacatgttagcagggaagagaacagaattttatccacccttatctctttagtgagtgaacaaacagcccactgtcatcgtggatacatttcacttttttcacatgactaaggagctctccggagtgaagagtgagtaaatatgtttattacgcattcatttgctaagaatcatcaagaacccaaagttagagacgtttcgtggttgaactttctccctactgtctagtagaattatatggggattctggatctgctggtgcc

SEQ ID NO: 697 - DNA, 246 bp, Homo sapien
  misc_feature (1)...(246): n = A,T,C or G
ctncagctctaatcgactnctatnaggnatgatggcncgtgcngcgcgtacgtantgcttggatcctcnnanagcggacgcctactactactaaattcgcggncgcgttgactttttttgtttttttccttnacagagntntttttgtgcccttggttcttatgctcanactcngcaaaaaanatcaaaagntacnnatgaaaaacntatnccatctncanaaaggaggtgnagntattactttct

SEQ ID NO: 698 - DNA, 3674 bp, Homo sapien
agaaagtttccttttttttttttaatggtgaaaagatatacacatatttagaattagccagctgggctcagtttagattattccaattttgttggcaacatccagagcatcgtaatcaggagccagtgaaacatattccttcttctctccatcaggccaaatcacggtgttgaccttggccacatcaatgtcttagaacttcttcacagcctgtttgatctggtgcttgttggctttaacatccacaatgaacacaagtgtgttgttgtcttctatcttcttcgtggtgactcagtggtcagcggaaacttgatgatagcgtagtggtcaagcttgtatctcctgggagcgctcttccaaagatatttgggctgcctcgggagttgcagcgtcttgggccgccggaaggtgggtgacgtacggatcttctttttttgtgtggctgtggacacctttcaacactgtcttcttggcctttaaatccttcgctttggtttcggctataggaggggcaggagcttccttcttcactttcggcgccatcttgtgaaaagggaaagtttcctttctaataccattttcacttctcccgaattttgtggatcgtttcttggtatctaccccagatttcaggagtgttggctggatcttagggattgtgaagtcttcatttccctgtggtgagatctgaggcatgattttaaacagtgtgagggaaggagatctccaggcactttaatagaatggagaagcaggatgggatttgagaggaaatctgattttgaaaaaaggagaactagagttgagttcgtaattaactagcaccttaaaggtcattcagcatgcccatctgcacagtgggtgtaatcaccctacagaacaaaaacaaaaaggcaatggagaggaagctgtaaagcactgtacatgtttaactcattgttatgtaagctagccgaaggcttcacagacttgaattcatctcccaagttctcttcctgtactggaaactctgccttaggttgcttaaaacttgagaaacagaatattgcttcccctgcctgccttcttgagtacacttgcctacacaaagatgcacatccttgtttgtgtgtgtgtgtccatttgctgtgacattcttgtgaaagtcaaagtttcccagctgttgacatacacaagtttgtttggtgcaacctgtcagatgcatcccttagacaggccctttgatactctgggaaagacattggacttacagtcggaacgaaaagaaagaaatgtgatatgtatagcgtgcagtgagttggagttttacctgtattgttttaatttcaacaagcctgaggactagccacaaatgtacccagtttacaaatgaggaaacaggtgcaaaaaggttgttacctgtcaaaggtcgtatgtggcagagccaagatttgagcccagttatgtctgatgaacttagcctatgctctttaaacttctgaatgctgaccattgaggatatctaaacttagatcaattgcattttccctccaagactatttacttatcaatacaataataccacctttaccaatctattgttttgatacgagactcaaatatgccagatatatgtaaaagcaacctacaagctctctaatcatgctcacctaaaagattcccgggatctaataggctcaaagaaacttcttctagaaatataaaagagaaaattggattatgcaaaaattcattattaatttttttcatccatcctttaattcagcaaacatttatctgttgttgactttatgcagtatggccttttaaggattgggggacaggtgaagaacggggtgccagaatgcatcctcctactaatgaggtcagtacacatttgcattttaaaatgccctgtccagctgggcatggtggatcatgcctgtaatctcaacattggaaggccaaggcaggaggattgcttcagcccaggagttcaagaccagcctgggcaacatagaaagaccccatctctcaatcaatcaatcaatgccctgtctttgaaaataaaactctttaagaaaggtttaatgggcagggtgtggtagctcatgcctataatacagcactttgggaggctgaggcaggaggatcactttagcccagaagttcaagaccagcctgggcaacaagtgacacctcatctcaattttttaataaaatgaatacatacataaggaaagataaaaagaaaagtttaatgaaagaatacagtataaaacaaatctcttggacctaaaagtatttttgttcaagccaaatattgtgaatcacctctctgtgttgaggatacagaatatctaagcccaggaaactgagcagaaagttcatgtactaactaatcaacccgaggcaaggcaaaaatgagactaactaatcaatccgaggcaaggggcaaattagacggaacctgactctggtctattaagcgacaactttccctctgttgtatttttcttttattcaatgtaaaaggataaaaactctctaaaactaaaaacaatgtttgtcaggagttacaaaccatgaccaactaattatggggaatcataaaatatgactgtatgagatcttgatggtttacaaagtgtacccactgttaatcactttaaacattaatgaacttaaaaatgaatttacggagattggaatgtttctttcctgttgtattagttggctcaggctgccataacaaaataccacagactgggaggcttaagtaacagaaattcatttctcacagttctgggggctggaagtccacgatcaaggtgcaggaaaggcaggcttcattctgaggcccctctcttggctcacatgtggccaccctcccactgcgtgctcacatgacctctttgtgctcctggaaagagggtgtgggggacagagggaaagagaaggagagggaactctctggtgtctcgtctttcaaggaccctaacctgggccactttggcccaggcactgtggggtggggggttgtggctgctctgctctgagtggccaagataaagcaacagaaaaatgtccaaagctgtgcagcaaagacaagccaccgaacagggatctgctcatcagtgtggggacctccaagtcggccaccctggaggcaagcccccamagagcccatgcaaggtggcagcagcagaagaagggaattgtccctgtccttggcacattcctcaccgacctggtgatgctggacactgcgatgaatggtaatgtggatgagaatatgatggactcccagaaaaggagacccagctgctcaggtggctgcaaatcattacagccttcatcctggggaggaactgggggcctggttctgggtcagagagcagcccagtgagggtgagagctacagcctgtcctgccagctggatccccagtcccggtcaaccagtaatcaaggctgagcagatcaggcttcccggagctggtcttgggaagccagccctggggtgagttggctcctgctgtggtactgagacaatattgtcataaattcaatgcgcccttgtatccctttttcttttttatctgtctacatctataatcactatgcatactagtctttgttagtgtttctattcmacttaatagagatatgttatacttaaaaaaaaaaaaaaaaa

SEQ ID NO: 699 - DNA, 2051 bp, Homo sapien
  misc_feature (1)...(2051): n = A,T,C or G
ggaccaggggctgaagtgaacccccagcacagcacagctgctctataaaaacgtggccagacttttttttttgaagcaagtccctgttcttgttcgtcctgactagtcccatcagggccctggatcccaagactcagcatccaaggtcccctccaggaatcctggcagctcagcatactttatcctgtttcatctgagagcaaaaatgtaaaattggatgcacagaaaagtgactcaaagtgcttaatgactagaagaaatctaggagcagcaagaagagcaggacaaacaggccaggcggtgtcaggagcccaggtctccagctgganggaacgtcaaccctgcagtgggagcaggggccctttgcacatcctaggcacagatggtaatgtagacaccacaggtaagctgggcttggtacctacccctccccggattcagaaagaaaccaaacaaggagctttgtgtggaatgaaacctcctttcctcccagaagcactgctgactgtttggtggttgccatttgtggcagtgagcccttgtttgttctgaggttgggctggtttctcctcttggccctgccctacagatcataaaggagaacagcaagacgtccccagcaaacatccacagatggccttggaaataagtcaccttcctcaccctgcaggaatgccagtgaacatattgctgacatcttggagctcagtacctcatagtgtaacggcgtcagtagatctgcctgtgctgggacttcctgtactacccattcctgaggggcgatgcttctgcagggcctgtgacttggtgcacaacttcagacaccatcatcttgcagcagcaccgcaccctcactagccagggtgttgatgacttcctcaaggccaaggccacattcaaggcttcggacttcattgatgcgcttgtgctgagcaaggtggcttctccgggatcttaattcaggaggtagaatggagcttgagatcaagtgtctgatcaagcctcagtgtatgggcgctgttcatcctctggtgctgaagcagccaagagacccaagtctgcctggctgcctcttaggatatgacagcagagccagtggcctctactagatcctgtacaacctcacaaaacacccagacatcgggagtgctgccagcctgtgatgcaagagtcctaatcctgaagacattgaatgacctgtcgttgtgctgtttttaccaaaaaggatcatgaggatcagagaggaaaagtcacttgcccaaagtcacacagctgaacagtggtggagttcaactttgaccgtgggctgtctggcccccaaggtgtatgcttgcttctctcccaagagactcctttcttatcaggctcaaatgaatgaaaggaggatgttaaagacaacgccattattgacgagatcactcccaagcggattggagattgtcccaatatttagacctatagcaaggccttgggagaaatggtggtgcagcaggagagcaggaacctaaccattgccatcctaaggccctccattgtgtggagcaacgtggcaccagcttttcctgggttgggttgataatctaaatggatgtagccgactcattattgcggtatgtatagggatgaagaagtaactgtaatgtagtggaggaatagtaagaaaattcttagtgctggcttagcttaattgatccaaaaacataaatgctactttactatcaattgaagcatattatttcaattattctggttataatatggaggcaggatgaaattgtttttattcttttagaatttttttttatcaggaaaacagaggtaaagtgctatcaattactatttaagagttctattttgaaaagtgagaattaaggatttttcttttctttttaaaaaaaacttttttaaaaattaaaaataaaagaagcaaaagtcttaggaaaatgaagcaagtagccctgccactctatgtacagtaataacaatatctgtcccagttattatgtacaatattataaaaaatgtcgcagacagtaaaaaaaaaaaaaaaa

SEQ ID NO: 700 - DNA, 2841 bp, Homo sapien
  misc_feature (1)...(2841): n = A,T,C or G
gcagagcacagcatagctgctttaccaaatcatggccagactgcttctgtaagcaggcccctgatcctgttccacctcactggacaggacctcccaactggggcctccagctacccccaccagcatcccttggccaatggaaatttgaaatgttcctgggacagagctcctggagagaggggcaggccaccacctttgctgtttgggtgactagccgttctggcctgcaggctttggagagcccaagctgacaaggggtagaagaggtgcctcagcacagcacagccacgctacgaaaacatggccagactcttgtttaagtcagtccccgaacacatttctagtcagtgggtgaagtctttcaaccagggtctctggctaccttgactgctgttctctggccgacagaggtctcaggcctccctgagtcagagctcccggggggaggaccagattgtcatctttgctgtttgggtgacccagccatttcagccttagggcttcagagtgtctgaggtagccaggggctgaagtgaacccccagcacagcacagctgctgtataaaaacgtggccagactttttctttaagcaagtccctgttcttattcctcctgactaggtaagacttctcaacttgcctccagccacatcttattggtgtgttcagattggcaacaggtttgtacctcagtggtacagagctcccagaggaaggggtaggctatcatcttccctggaaaatacgagtcaattagggacttgaggggacccccagcattccacagcagcccttcagaaaagtggccagactctgtacttgatgggcagatcctcctggcctgtgtctctagccagcccaccactggagctatcaagccagtagcaactcagcagttccttggacagagcttccaggagcaaatgaaatcctttctgccactgcctttgcagtgaactgcccttgctatcctcagaagatatatcacgggagcaaagaccctaagtgccatatcaacacctccaataagctgcagttgacccaaagaacaagccaatccatctcccacaggttccacacacactccactactcatcaccagacagggaaccctggcttgggcccacagcacagaccctccatcctgggccgattacactgagtgattgctaactcacatgtctctgggatggagcacccaggagacaagcaaagtggtggagcagcaagtcaggtgatgtggagcccagagggcagggagagctatctctctgggctccacttgcccttgtgagacactttgtcccagcactccttagtctgcttgcctctcccagggccccagcctggccacacctgcttacagggcactctcagatgcccataccatagtttctgtgctagtggaccgtaccatatcagtggagagctgcagcaaggtggcccntacggccacgcaccagcctgcacattacctctccatactgcagccctttatatggaaacttcctacatcactttgctgtgtgtgtttacacaggtggattttgctttacttgcactgacagcacacaggagggcagcacacaccccaacccacatcaactgccattaaagaaaagaaatttcagcccataatttcatgtccagcaaaattaggcatcataagtgaaggagaaataagatccttttcagacaagcaaatgctgagggaattcaatatcaccagatctaccttacaagagctcctgaaggaagcactaaatatggaaagaaaaaaccatcaccagccactacaaaaatgcagtgaagaacgcagtgaattacgcagtccagtgatgctaaaaaccaaccacatacgttaagtctgcaaaataaccagctgacagcatgacgacaggataaatccacacataccattactaaccttaaatgaaaatgggctaaatgctcccattgaaagacatggggcaagctggataaagaaccaagacccactggagtatgctgtcttcaagaaacccatctcacatgcggtggcatacataggctcaaaataaaggaatggagaaaaatatttcaagcaaatggaaaacagaaaaaagcaggtgttgcactcctactttctgacaaaacagactatgcgaataaagataaaaaagagaaggacattacaaaggtggtcctgacctttgatatatctcattgcttgataccaacctgggctgttttaattgcccaaanccaataggataatttgctgaggttgtggagcttctcccctgcagagagtccctgatctcccaaaatttggttgagatgtaaggttgattttgctgtacaactccttttctgaagttttactcatttccaaaaaggaaggcaagttttcctgcttccatgacgatggagagcaggcatctcctttcctgagtttcagcttgcttctgacagggaaggtgagtgtaagttttttccagcttctaagatggcagagaacgatcaccagcctgagccttatttccaggtaagtagctgaattagagttttgtcttaaaatttttccttaatgattaaaatgtaagattacccaccagctgcttttaatttctcccttagcattagaacactcagtaatcatatgaattgtgcatttgtttgttttgcttaactctttctgtttgtttatgtttggggttttattgttgttgtttcacttttctcccatctcttcctgacttggtcaaatccaaaggaatgttcgaaattgtggggagcaaggcatctgaaatggctaaaactcctgtggctgcaaaaaatagaaataaaaaaaaaaaaaaa

SEQ ID NO: 701 - DNA, 3228 bp, Homo sapien
  misc_feature (1)...(3228): n = A,T,C or G
tccgccccattgacgcaaatggcggtaggcgtgtacggtgggaggtctatataagcagagctctcnggctaactagagaacccactgcttactggcttatcgaaattaatacgactcactatagggagacccaagctggctagcgtttaaacttaagcttggtaccgagctcggatccactagtccagtgtggtggaattccattgtgttgggcaggaaacaagcaaagtggtggagcagcaagtcaggtgatgtggagcccagaggtcagggatggctgtctctctagggtccacttgcccttgtgagacactttatcccagcactttaggaatactgaggtcataccagccacatcttatatgcaagattgcccagcagagatcaggtccgagagttccctttttaaaaaaaggagacttgcttaataaaagaagtctagccacgtttgtgtagagcggctgtgctgtgctgggggttcacttttgagagagttctcctctgagacctgatctctggaggctgggcaatcttgcacttgagatggggctggtctgatctcagcactccttagtctgctcgcctctcccatggccccagcctggccacacctgcttacggggcactcttagatgcccacaccataacttccatgctagtggactgtaccatatcagtggagagctgcagcaaggtggcccctagagccacgcaccagcctgcacattgcctctccatacggcagccctttatttggaaacttcctaaatcactttgctgtgtgtgtttacacgggtgtgttttgctttacttgccctgagagcacacgggagtgcagcacacaccccaacccacatcaactgccattaaagaaaagaaatttcagcccagaatttcatgtccagcaaaattaagcatcataagtgaaggagaaataagatccttttcagacaagcaagtgctgagggaatttggtatcaccagatctaccttacgagagctcctgaaggaagcactaaatatggaaagaaaagatcatcacctgctactacaaaaacacactgaagtacacagtccaatgatgctaaaaagcaagcacatatgtaagtctgcaaaataaccagctgacagcatgacgacaggataaaatccacacataccattactaaccttaaatgtaaatgggctaaatgctcccattgaaagacacggggcaagctgggtaaagaaccaagacccactggagtatgccgtcttcaagcaacccatctcacgtgcagtgccatacataggctcaaaataaaggaatggagaaaaatatttcaagcaaatggaaaacagaaaaaaggtgttgcactcccagtttctgacaaaacagactctaccaataaagataaaaaaagagaaggacattacaaaggtggtcctgacctttgataaatctcattattgcttgataccaacctgggctatttgtattgcccaaacgaataggataatttgctgaggttgtggagcttctccccttcacagagtccctgatctccgaaaatttggttgagatgtaaggttgattttgctgtacaactccttttttgaagttttactcatttccaacaaggaaggcaagttttcctgcttccattgacaaaggagagcaggcacctcctttcctgagtttcagcttgcttctgacagggaaggagctttgagatttgaatactggcctgctgggttttggacgtgcattgggcctgtggtcccatttgtgttatttttctgggaaatttcttccctttggagtgagaaagcttacccaatgcctgtaccatcatcgtaccttaaaagaactccattttaagttcagggactccttggcagaagagaccgtagccttgtatcagatcataaaggagaagagcaagaggtccccggcaaacatccacagatggccttggaaataagtcaccttgctcaccctgcaggaatgccagtgaacttattgctgacatcttggagctcagtaccctcatagtgtaacggcgtcagcagatctgcctgtgctgggacttcctgtactacccattcctgaggggcgatgcttctgcagggcctgtgacttggtgcacaacttcagacaccatcatcttgcagcagcaccgcaccctcactagccagggtgttgatgacttcctcaaggccaaggccacattcaaggcttcggacttcattgatgcgcttgtgctgagcaaggtggcttctccgggatcttaattcaggaggtagaatggagcttgagatcaagtgtctgatcaagcctcagtgtatgggcgctgttcatcntctggtgctgaagcagccaagagacccaagtctgcctggctgcntcttaggatatgacagcagagccagtggcctctactagatcctgtacaacctcacaaaacacccagacatcgggagtgctgccagcctgtgatgcaagagtcctaatcctgaagacattgaatgacctgtcattctgctgtttttaccaaaaaggatcatgaggatcagagaggaaaagtcacttgcccaaagtcacacagctgaacagtggtggagttcaactttgaccgtgggctgtctgaccccaaggtgtatgcttgcttctctcccaagagacaactttcttatcaggctcaaatgaatgaaaggaggatgttaaaggtaggatctctgaagcctgtgccagtggaaccgcagctcatggctggcacctgtgttctcattcttacctcattaagagtaaagtttattgagtttattgaatttaagtatctttagtgagatcatatattattagtaagaactgggaccaaacagattttctgactctaaaagagagattttcacagaaacagatatatacctgtaagtatacagacacgcatacacacatttctttactgctcataaaaattagtccttattagaatgtgggatgtataaatgtaagagaattttcatgttaaaattgacagatacatttttaaattgtcctaaaataaatttaattatttttnttttagaattttccattattaatgttatttttatgagaaactatataactttattgataatacatacaataaccctttgtttttcaaattgaaaatacagtgtattttgcaaataactaagtcctaattttgtattaaaattttaaattttcaaaaaaaaaaa

SEQ ID NO: 702 - DNA, 4894 bp, Homo sapiens
ctgcacgcgctggctccgggtgacagccgcgcgcctcggccaggatctgagtgatgagacgtgtccccactgaggtgccccacagcagcaggtgttgagcatgggctgagaagctggaccggcaccaaagggctggcagaaatgggcgcctggctgattcctaggcagttggcggcagcaaggaggagaggccgcagcttctggagcagagccgagacgaagcagttctggagtgcctgaacggccccctgagccctacccgcctggcccactatggtccagaggctgtgggtgagccgcctgctgcggcaccggaaagcccagctcttgctggtcaacctgctaacctttggcctggaggtgtgtttggccgcaggcatcacctatgtgccgcctctgctgctggaagtgggggtagaggagaagttcatgaccatggtgctgggtgagtcactacatcctccttccttcctgttccagatacatgccacctggcatgtgggacaggagtacctctgccctgggagctgcttggagggagaggtggtctgctgggaaggcattgctgggcaggagggtgaccctgggctgagggggcacaccaagagaaagaagagaataccaaggacataccccagtcacctctggatccctggtcctgcacagagcctggctcataggagacactggagaaatgctcctaacctttggctagcccttttataatttatagcgattatctcatttaatgcttacaaccaccatttgaggtgatccattttacagagaaggaagcagaggcttttaagaggttaggtaagtcttagccaaagccaaatagcagctgaacagtagagctgggactccatcaaggtctcccagccggagcttgctcctacccctaggacaaggggtggactcctgactctgcagataaattctacaaaagccacagaaggcaagtagtaaccattgtgtgacaacccctcacccccaggaagaggggcccctgtgaggattgcaggctctggagtcacactgcttgttgaaacgctgcctcttaccctccctaggtctgcgcctttgaataagtatcacttcttagttgctccatgcctcagtttgtccatctgaaaatgggggcatctgtaatgcctgtgttatgaggagtaaattacagcatccctgtgaagacgtagcacagtgtcgagtacggaatgttatttccatccttctcacggagcttggttccccttccccttgccctttacttgtcccagccattgactcatactacttcccttcttgcaggcattggtccagtgctgggcctggtctgtgtcccgctcctaggctcagccagtgaccactggcgtggacgctatggccgccgccggcccttcatctgggcactgtccttgggcatcctgctgagcctctttctcatcccaagggccggctggctagcagggctgctgtgcccggatcccaggcccctggagctggcactgctcatcctgggcgtggggctgctggacttctgtggccaggtgtgcttcactccactggaggccctgctctctgacctcttccgggacccggaccactgtcgccaggcctactctgtctatgccttcatgatcagtcttgggggctgcctgggctacctcctgcctgccattgactgggacaccagtgccctggccccctacctgggcacccaggaggagtgcctctttggcctgctcaccctcatcttcctcacctgcgtagcagccacactgctggtggctgaggaggcagcgctgggccccaccgagccagcagaagggctgtcggccccctccttgtcgccccactgctgtccatgccgggcccgcttggctttccggaacctgggcgccctgcttccccggctgcaccagctgtgctgccgcatgccccgcaccctgcgccggctcttcgtggctgagctgtgcagctggatggcactcatgaccttcacgctgttttacacggatttcgtgggcgaggggctgtaccagggcgtgcccagagctgagccgggcaccgaggcccggagacactatgatgaaggtaaggccttggcagccagcagaggctggtgtgggagccgcccaccagagacgacactcggggctgtgtctgggctggtgcctctccatcctggccccgacttctctgtcaggaaagtggggatggaccccatctgcatacacggcttctcatgggtgtggaacatctctgcttgcggtttcaggaaggcctctggctgctctaggagtctgatcagagtcgttgccccagtttgacagaaggaaaggcggagcttattcaaagtctagagggagtggaggagttaaggctggatttcagatctgcctggttccagccgcagtgtgccctctgctcccccaacgactttccaaataatctcaccagcgccttccagctcaggcgtcctagaagcgtcttgaagcctatggccagctgtctttgtgttccctctcacccgcctgtcctcacagctgagactcccaggaaaccttcagactaccttcctctgccttcagcaaggggcgttgcccacattctctgagggtcagtggaagaacctagactcccattgctagaggtagaaaggggaagggtgctggggagcagggctggtccacagcaggtctcgtgcagcaggtacctgtggttccgccttctcatctccctgagactgctccgacccttccctcccaggctctgtctgatggcccctctccctctgcaggcgttcggatgggcagcctggggctgttcctgcagtgcgccatctccctggtcttctctctggtcatggaccggctggtgcagcgattcggcactcgagcagtctatttggccagtgtggcagctttccctgtggctgccggtgccacatgcctgtcccacagtgtggccgtggtgacagcttcagccgccctcaccgggttcaccttctcagccctgcagatcctgccctacacactggcctccctctaccaccgggagaagcaggtgttcctgcccaaataccgaggggacactggaggtgctagcagtgaggacagcctgatgaccagcttcctgccaggccctaagcctggagctcccttccctaatggacacgtgggtgytggaggcagtggcctgctcccacctccacccgcgctctgcggggcctctgcctgtgatgtctccgtacgtgtggtggtgggtgagcccaccgaggccagggtggttccgggccggggcatctgcctggacctcgccatcctggatagtgccttcctgctgtcccaggtggccccatccctgtttatgggctccattgtccagctcagccagtctgtcactgcctatatggtgtctgccgcaggcctgggtctggtcgccatttactttgctacacaggtagtatttgacaagagcgacttggccaaatactcagcgtagaaaacttccagcacattggggtggagggcctgcctcactgggtcccagctccctgctcctgttagccccatggggctgccgggctggccgccagtttctgttgctgccaaagtaatgtggctctctgctgccaccctgtgctgctgaggtgcgtagctgcacagctgggggctggggcgtccctctcctctctccccagtctctagggctgcctgactggaggccttccaagggggtttcagtctggacttatacagggaggccagaagggctccatgcactggaatgcggggactctgcaggtggattacccaggctcagggttaacagctagcctcctagttgagacacacctagagaagggtttttgggagctgaataaactcagtcacctggtttcccatctctaagccccttaacctgcagcttcgtttaatgtagctcttgcatgggagtttctaggatgaaacactccaccatgggatttgaacatatgaaagttatttgtaggggaagagtcctgaggggcaacacacaagaaccaggtcccctcagcccacagcactgtctttttgctgatccacccccctcttaccttttatcaggatgtggcctgttggtccttctgttgccatcacagagacacaggcatttaaatatttaacttatttatttaacaaagtagaagggaatccattgctagcttttctgtgttggtgtctaatatttgggtagggtgggggatccccaacaatcaggtcccctgagatagctggtcattgggctgatcattgccagaatcttcttctcctggggtctggccccccaaaatgcctaacccaggaccttggaaattctactcatcccaaatgataattccaaatgctgttacccaaggttagggtgttgaaggaaggtagagggtggggcttcaggtctcaacggcttccctaaccacccctcttctcttggcccagcctggttccccccacttccactcccctctactctctctaggactgggctgatgaaggcactgcccaaaatttcccctacccccaactttcccctacccccaactttccccaccagctccacaaccctgtttggagctactgcaggaccagaagcacaaagtgcggtttcccaagcctttgtccatctcagcccccagagtatatctgtgcttggggaatctcacacagaaactcaggagcaccccctgcctgagctaagggaggtcttatctctcagggggggtttaagtgccgtttgcaataatgtcgtcttatttatttagcggggtgaatattttatactgtaagtgagcaatcagagtataatgtttatggtgacaaaattaaaggctttcttatatgtttaaaaa

SEQ ID NO: 703 - DNA, 2904 bp, Homo sapiens
gtctatgccttcatgatcagtcttgggggctgcctgggctacctcctgcctgccattgactgggacaccagtgccctggccccctacctgggcacccaggaggagtgcctctttggcctgctcaccctcatcttcctcacctgcgtagcagccacactgctggtggctgaggaggcagcgctgggccccaccgagccagcagaagggctgtcggccccctccttgtcgccccactgctgtccatgccgggcccgcttggctttccggaacctgggcgccctgcttccccggctgcaccagctgtgctgccgcatgccccgcaccctgcgccggctcttcgtggctgagctgtgcagctggatggcactcatgaccttcacgctgttttacacggatttcgtgggcgaggggctgtaccagggcgtgcccagagctgagccgggcaccgaggcccggagacactatgatgaaggaaggcctctggctgctctaggagtctgatcagagtcgttgccccagtttgacagaaggaaaggcggagcttattcaaagtctagagggagtggaggagttaaggctggatttcagatctgcctggttccagccgcagtgtgccctctgctcccccaacgactttccaaataatctcaccagcgccttccagctcaggcgtcctagaagcgtcttgaagcctatggccagctgtctttgtgttccctctcacccgcctgtcctcacagctgagactcccaggaaaccttcagactaccttcctctgccttcagcaaggggcgttgcccacattctctgagggcgttcggatgggcagcctggggctgttcctgcagtgcgccatctccctggtcttctctctggtcatggaccggctggtgcagcgattcggcactcgagcagtctatttggccagtgtggcagctttccctgtggctgccggtgccacatgcctgtcccacagtgtggccgtggtgacagcttcagccgccctcaccgggttcaccttctcagccctgcagatcctgccctacacactggcctccctctaccaccgggagaagcaggtgttcctgcccaaataccgaggggacactggaggtgctagcagtgaggacagcctgatgaccagcttcctgccaggccctaagcctggagctcccttccctaatggacacgtgggtgctggaggcagtggcctgctcccacctccacccgcgctctgcggggcctctgcctgtgatgtctccgtacgtgtggtggtgggtgagcccaccgaggccagggtggttccgggccggggcatctgcctggacctcgccatcctggatagtgccttcctgctgtcccaggtggccccatccctgtttatgggctccattgtccagctcagccagtctgtcactgcctatatggtgtctgccgcaggcctgggtctggtcgccatttactttgctacacaggtagtatttgacaagagcgacttggccaaatactcagcgtagaaaacttccagcacattggggtggagggcctgcctcactgggtcccagctccccgctcctgttagccccatggggctgccgggctggccgccagtttctgttgctgccaaagtaatgtggctctctgctgccaccctgtgctgctgaggtgcgtagctgcacagctgggggctggggcgtccctctcctctctccccagtctctagggctgcctgactggaggccttccaagggggtttcagtctggacttatacagggaggccagaagggctccatgcactggaatgcggggactctgcaggtggattacccaggctcagggttaacagctagcctcctagttgagacacacctagagaagggtttttgggagctgaataaactcagtcacctggtttcccatctctaagccccttaacctgcagcttcgtttaatgtagctcttgcatgggagtttctaggatgaaacactcctccatgggatttgaacatatgaaagttatttgtaggggaagagtcctgaggggcaacacacaagaaccaggtcccctcagcccacagcactgtctttttgctgatccacccccctcttaccttttatcaggatgtggcctgttggtccttctgttgccatcacagagacacaggcatttaaatatttaacttatttatttaacaaagtagaagggaatccattgctagcttttctgtgttggtgtctaatatttgggtagggtgggggatccccaacaatcaggtcccctgagatagctggtcattgggctgatcattgccagaatcttcttctcctggggtctggccccccaaaatgcctaacccaggaccttggaaattctactcatcccaaatgataattccaaatgctgttacccaaggttagggtgttgaaggaaggtagagggtggggcttcaggtctcaacggcttccctaaccacccctcttctcttggcccagcctggttccccccacttccactcccctctactctctctaggactgggctgatgaaggcactgcccaaaatttcccctacccccaactttcccctacccccaactttccccaccagctccacaaccctgtttggagctactgcaggaccagaagcacaaagtgcggtttcccaagcctttgtccatctcagcccccagagtatatctgtgcttggggaatctcacacagaaactcaggagcaccccctgcctgagctaagggaggtcttatctctcagggggggtttaagtgccgtttgcaataatgtcgtcttatttatttagcggggtgaatattttatactgtaagtgagcaatcagagtataatgtttatggtgacaaaattaaaggctttcttatatgtttaaaaa

SEQ ID NO: 704 - DNA, 4034 bp, Homo sapiens
aaccagcctgcacgcgctggctccgggtgacagccgcgcgcctcggccaggatctgagtgatgagacgtgtccccactgaggtgccccacagcagcaggtgttgagcatgggctgagaagctggaccggcaccaaagggctggcagaaatgggcgcctggctgattcctaggcagttggcggcagcaaggaggagaggccgcagcttctggagcagagccgagacgaagcagttctggagtgcctgaacggccccctgagccctacccgcctggcccactatggtccagaggctgtgggtgagccgcctgctgcggcaccggaaagcccagctcttgctggtcaacctgctaacctttggcctggaggtgtgtttggccgcaggcatcacctatgtgccgcctctgctgctggaagtgggggtagaggagaagttcatgaccatggtgctgggcattggtccagtgctgggcctggtctgtgtcccgctcctaggctcagccagtgaccactggcgtggacgctatggccgccgccggcccttcatctgggcactgtccttgggcatcctgctgagcctctttctcatcccaagggccggctggctagcagggctgctgtgcccggatcccaggcccctggagctggcactgctcatcctgggcgtggggctgctggacttctgtggccaggtgtgcttcactccactggaggccctgctctctgacctcttccgggacccggaccactgtcgccaggcctactctgtctatgccttcatgatcagtcttgggggctgcctgggctacctcctgcctgccattgactgggacaccagtgccctggccccctacctgggcacccaggaggagtgcctctttggcctgctcaccctcatcttcctcacctgcgtagcagccacactgctggtggctgaggaggcagcgctgggccccaccgagccagcagaagggctgtcggccccctccttgtcgccccactgctgtccatgccgggcccgcttggctttccggaacctgggcgccctgcttccccggctgcaccagctgtgctgccgcatgccccgcaccctgcgccggctcttcgtggctgagctgtgcagctggatggcactcatgaccttcacgctgttttacacggatttcgtgggcgaggggctgtaccagggcgtgcccagagctgagccgggcaccgaggcccggagacactatgatgaaggtaaggccttggcagccagcagaggctggtgtgggagccgcccaccagagacgacactcggggctgtgtctgggctggtgcctctccatcctggccccgacttctctgtcaggaaagtggggatggaccccatctgcatacacggcttctcatgggtgtggaacatctctgcttgcggtttcaggaaggcctctggctgctctaggagtctgatcagagtcgttgccccagtttgacagaaggaaaggcggagcttattcaaagtctagagggagtggaggagttaaggctggatttcagatctgcctggttccagccgcagtgtgccctctgctcccccaacgactttccaaataatctcaccagcgccttccagctcaggcgtcctagaagcgtcttgaagcctatggccagctgtctttgtgttccctctcacccgcctgtcctcacagctgagactcccaggaaaccttcagactaccttcctctgccttcagcaaggggcgttgcccacattctctgagggtcagtggaagaacctagactcccattgctagaggtagaaaggggaagggtgctggggagcagggctggtccacagcaggtctcgtgcagcaggtacctgtggttccgccttctcatctccctgagactgctccgacccttccctcccaggctctgtctgatggcccctctccctctgcaggcgttcggatgggcagcctggggctgttcctgcagtgcgccatctccctggtcttctctctggtcatggaccggctggtgcagcgattcggcactcgagcagtctatttggccagtgtggcagctttccctgtggctgccggtgccacatgcctgtcccacagtgtggccgtggtgacagcttcagccgccctcaccgggttcaccttctcagccctgcagatcctgccctacacactggcctccctctaccaccgggagaagcaggtgttcctgcccaaataccgaggggacactggaggtgctagcagtgaggacagcctgatgaccagcttcctgccaggccctaagcctggagctcccttccctaatggacacgtgggtgctggaggcagtggcctgctcccacctccacccgcgctctgcggggcctctgcctgtgatgtctccgtacgtgtggtggtgggtgagcccaccgaggccagggtggttccgggccggggcatctgcctggacctcgccatcctggatagtgccttcctgctgtcccaggtggccccatccctgtttatgggctccattgtccagctcagccagtctgtcactgcctatatggtgtctgccgcaggcctgggtctggtcgccatttactttgctacacaggtagtatttgacaagagcgacttggccaaatactcagcgtagaaaacttccagcacattggggtggagggcctgcctcactgggtcccagctccccgctcctgttagccccatggggctgccgggctggccgccagtttctgttgctgccaaagtaatgtggctctctgctgccaccctgtgctgctgaggtgcgtagctgcacagctgggggctggggcgtccctctcctctctccccagtctctagggctgcctgactggaggccttccaagggggtttcagtctggacttatacagggaggccagaagggctccatgcactggaatgcggggactctgcaggtggattacccaggctcagggttaacagctagcctcctagttgagacacacctagagaagggtttttgggagctgaataaactcagtcacctggtttcccatctctaagccccttaacctgcagcttcgtttaatgtagctcttgcatgggagtttctaggatgaaacactcctccatgggatttgaacatatgaaagttatttgtaggggaagagtcctgaggggcaacacacaagaaccaggtcccctcagcccacagcactgtctttttgctgatccacccccctcttaccttttatcaggatgtgcctgttggtccttctgttgccatcacagagacacaggcatttaaatatttaacttatttatttaacaaagtagaagggaatccattgctagcttttctgtgttggtgtctaatatttgggtagggtgggggatccccaacaatcaggtcccctgagatagctggtcattgggctgatcattgccagaatcttcttctcctggggtctggccccccaaaatgcctaacccaggaccttggaaattctactcatcccaaatgataattccaaatgctgttacccaaggttagggtgttgaaggaaggtagagggtggggcttcaggtctcaacggcttccctaaccacccctcttctcttggcccagcctggttccccccacttccactcccctctactctctctaggactgggctgatgaaggcactgcccaaaatttcccctacccccaactttcccctacccccaactttccccaccagctccacaaccctgtttggagctactgcaggaccagaagcacaaagtgcggtttcccaagcctttgtccatctcagcccccagagtatatctgtgcttggggaatctcacacagaaactcaggagcaccccctgcctgagctaagggaggtcttatctctcagggggggtttaagtgccgtttgcaataatgtcgtcttatttatttagcggggtgaatattttatactgtaagtgagcaatcagagtataatgtttatggtgacaaaattaaaggctttcttatatgtttaaaaa

SEQ ID NO: 705 - DNA, 6976 bp, Homo sapiens
gaagctggaccggcaccaaagggctggcagaaatgggcgcctggctgattcctaggcagttggcggcagcaaggaggagaggccgcagcttctggagcagagccgagacgaagcagttctggagtgcctgaacggccccctgagccctacccgcctggcccactatggtccagaggctgtgggtgagccgcctgctgcggcaccggaaagcccagctcttgctggtcaacctgctaacctttggcctggaggtgtgtttggccgcaggcatcacctatgtgccgcctctgctgctggaagtgggggtagaggagaagttcatgaccatggtgctgggtgagtcactacatcctccttccttcctgttccagatacatgccacctggcatgtgggacaggagtacctctgccctgggagctgcttggagggagaggtggtctgctgggaaggcattgctgggcaggagggtgaccctgggctgagggggcacaccaagagaaagaagagaataccaaggacataccccagtcacctctggatccctggtcctgcacagagcctggctcataggagacactggagaaatgctcctaacctttggctagcccttttataatttatagcgattatctcatttaatgcttacaaccaccatttgaggtgatccattttacagagaaggaagcagaggcttttaagaggttaggtaagtcttagccaaagccaaatagcagctgaacagtagagctgggactccatcaaggtctcccagccggagcttgctcctacccctaggacaaggggtggactcctgactctgcagataaattctacaaaagccacagaaggcaagtagtaaccattgtgtgacaacccctcacccccaggaagaggggcccctgtgaggattgcaggctctggagtcacactgcttgttgaaacgctgcctcttaccctccctaggtctgcgcctttgaataagtatcacttmttagttgctccatgcctcagtttgtccatctgaaaatgggggcatctgtaatgcctgtgttatgaggagtaaattacagcatccctgtgaagacgtagcacagtgtcgagtacggaatgttatttccatccttctcacggagcttggttccccttccccttgccctttacttgtcccagccattgactcatactacttcccttcttgcaggcattggtccagtgctgggcctggtctgtgtcccgctcctaggctcagccagtgaccactggcgtggacgctatggccgccgccggcccttcatctgggcactgtccttgggcatcctgctgagcctctttctcatcccaagggccggctggctagcagggctgctgtgcccggatcccaggcccctggagctggcactgctcatcctgggcgtggggctgctggacttctgtggccaggtgtgcttcactccactggaggccctgctctctgacctcttccgggacccggaccactgtcgccaggcctactctgtctatgccttcatgatcagtcttgggggctgcctgggctacctcctgcctgccattgactgggacaccagtgccctggccccctacctgggcacccaggaggagtgcctctttggcctgctcaccctcatcttcctcacctgcgtagcagccacactgctggtggctgaggaggcagcgctgggccccaccgagccagcagaagggctgtcggccccctccttgtcgccccactgctgtccatgccgggcccgcttggctttccggaacctgggcgccctgcttccccggctgcaccagctgtgctgccgcatgccccgcaccctgcgccggctcttcgtggctgagctgtgcagctggatggcactcatgaccttcacgctgttttacacggatttcgtgggcgaggggctgtaccagggcgtgcccagagctgagccgggcaccgaggcccggagacactatgatgaaggtaaggccttggcagccagcagaggctggtgtgggagccgcccaccagagacgacactcggggctgtgtctgggctggtgcctctccatcctggccccgacttctctgtcaggaaagtggggatggaccccatctgcatacacggcttctcatgggtgtggaacatctctgcttgcggtttcaggaaggcctctggctgctctaggagtctgatcagagtcgttgccccagtttgacagaaggaaaggcggagcttattcaaagtctagagggagtggaggagttaaggctggatttcagatctgcctggttccagccgcagtgtgccctctgctcccccaacgactttccaaataatctcaccagcgccttccagctcaggcgtcctagaagcgtcttgaagcctatggccagctgtctttgtgttccctctcacccgcctgtcctcacagctgagactcccaggaaaccttcagactaccttcctctgccttcagcaaggggcgttgcccacattctctgagggtcagtggaagaacctagactcccattgctagaggtagaaaggggaagggtgctggggagcagggctggtccacagcaggtctcgtgcagcaggtacctgtggttccgccttctcatctccctgagactgctccgacccttccctcccaggctctgtctgatggcccctctccctctgcaggcgttcggatgggcagcctggggctgttcctgcagtgcgccatctccctggtcttctctctggtcatggaccggctggtgcagcgattcggcactcgagcagtctatttggccagtgtggcagctttccctgtggctgccggtgccacatgcctgtcccacagtgtggccgtggtgacagcttcagccgccctcaccgggttcaccttctcagccctgcagatcctgccctacacactggcctccctctaccaccgggagaagcaggtactcattggccagtgggtggagtcagggtgggaggggtggtctgggtttttgggaggccaactagctcagaacctggtatctggcaagcaactttggagaatgcttctttgaatcagagaagaagcttatcctagccccagggccagaggcttgggctgcagaacagtgtagattagattctgggaatgacttcctggggtcaggactgtgtagcacttgaatggatgattgcaggaaatgcaaaatacgatagtgggaatcccgaagggtcaggccagcaggagccctaggcttctaggctggttgttctatggagaggcagggcgctgaatcagatgacccctgggccattcagcctcagcagacgggagtgggaatggtccagccttagcaacacctttcttcagggagcagcaacctgacttagcctgtatcctactctggtctctgagatggggcaggctccttcctaccccctttctttctggcttatttttcttttctgtctaattcccttttcttttcctgcatccctcctttgcctccttccctttctccttccccttccccttcccctgtggcagatatctgagcttgacacctgacccactcacttgggcactgtgtaagttgtggggacctccttcttggttggccctacactaaccagcccctccaggggcccctttccttgggaagccacctaacccaggtagtgtggtcatccttgtcccctccactgacctcactgagctacaaacctgggtgctggactctgccttgaggggcatgaagttggggtgtcccaagggaggaggagatgcaggactgctctcatagagctctcagactgtagggaagacctgcccctgcgtctcgtagcacttgaggagaggagtaggtaagttcgtagctgagaggctggttaactgagtaggtagctgcaggggtgagaggtatggaggggaggggctaaggttttggttgggggagcctggtccctgagacccctgttagcccactgataaccttcttcagccttcactcttctgcttgcctgggctgggggcagggggctggcatcagcggccaggcctgagtatgtgctgtcgtgccagggaacgttctggggctagccatcttctccagatggaggagcatgtctgtcctcggaccactccagactccaacctcagcggacattcctggggtggcaggcagggaggagaagtcctgggaggccccttcctaacagcagctgatggcagacttggcactgcacgctgtctgcctgttcctttgcccacttgttgagctgcatggtgagccgtgggcttccctggtgtcaggtttgagctctgccatggctcccacctcgcaaatgcagccaactcaactcttctggcatggggacaatgttggataagacctggccttgtccttaaataggaggctctgggccatcaagggcaggggttggggggatggtggtcgaccagtcactctgatctaagtcagacagcaggaaggaagtgagaagccttcaacattagcacagctggggctgggggaggtgggaagagggacattcctcctgcttggggtctactggattctccctgccccaaggctggggacaagggagctcatggcagggcagctaccctagtggcatctgggaccccagagaggcagagcttctctgcaccgggcaatgaggatttccagatgtcggagtggagggcaggcaggaaggaaggttaggagagcctgcgtggggtttgggccatcaggggccctgccttggcttttgttcctctgttctgtgcatctcttaccaccgtcttcattccccctgtgtcttttccttaccttggagctctgttctctctgatctgtgatattgagtttgtctgcctcttacctgttctaagaggctagaggagacctagacttctgggttcacatttgtccccgccctaccccgttacccttctcccactcctgaggaagggtcctggttagacttggaccaagtagggtctccatcttctctcctgctcctgattctcatgaagtcccattgcccctgggatggaggcaagggtctgttctcacagctggggtggtgccagtgctgggtacacacctgtcctcttccccttttcttcacccctctgccttaggtgttcctgcccaaataccgaggggacactggaggtgctagcagtgaggacagcctgatgaccagcttcctgccaggccctaagcctggagctcccttccctaatggacacgtgggtgctggaggcagtggcctgctcccacctccacccgcgctctgcggggcctctgcctgtgatgtctccgtacgtgtggtggtgggtgagcccaccgaggccagggtggttccgggccggggcatctgcctggacctcgccatcctggatagtgccttcctgctgtcccaggtggccccatccctgtttatgggctccattgtccagctcagccagtctgtcactgcctatatggtgtctgccgcaggcctgggtctggtcgccatttactttgctacacaggtagtatttgacaagagcgacttggccaaatactcagcgtagaaaacttccagcacattggggtggagggcctgcctcactgggtcccagctccccgctcctgttagccccatggggctgccgggctggccgccagtttctgttgctgccaaagtaatgtggctctctgctgccaccctgtgctgctgaggtgcgtagctgcacagctgggggctggggcgtccctctcctctctccccagtctctagggctgcctgactggaggccttccaagggggtttcagtctggacttatacagggaggccagaagggctccatgcactggaatgcggggactctgcaggtggattacccaggctcagggttaacagctagcctcctagttgagacacacctagagaagggtttttgggagctgaataaactcagtcacctggtttcccatctctaagccccttaacctgcagcttcgtttaatgtagctcttgcatgggagtttctaggatgaaacactcctccatgggatttgaacatatgaaagttatttgtaggggaagagtcctgaggggcaacacacaagaaccaggtcccctcagcccacagcactgtctttttgctgatccacccccctcttaccttttatcaggatgtggcctgttggtccttctgttgccatcacagagacacaggcatttaaatatttaacttatttatttaacaaagtagaagggaatccattgctagcttttctgtgttggtgtctaatatttgggtagggtgggggatccccaacaatcaggtcccctgagatagctggtcattgggctgatcattgccagaatcttcttctcctggggtctggccccccaaaatgcctaacccaggaccttggaaattctactcatcccaaatgataattccaaatgctgttacccaaggttagggtgttgaaggaaggtagagggtggggcttcaggtctcaacggcttccctaaccacccctcttctcttggcccagcctggttccccccacttccactcccctctactctctctaggactgggctgatgaaggcactgcccaaaatttcccctacccccaactttcccctacccccaactttccccaccagctccacaaccctgtttggagctactgcaggaccagaagcacaaagtgcggtttcccaagcctttgtccatctcagcccccagagtatatctgtgcttggggaatctcacacagaaactcaggagcaccccctgcctgagctaagggaggtcttatctctcagggggggtttaagtgccgtttgcaataatgtcgtcttatttatttagcggggtgaatattttatactgtaagtgagcaatcagagtataatgtttatggtgacaaaattaaaggctttcttatatgtttaaaaaaa

SEQ ID NO: 706 - protein, 123 aa, Homo sapiens [sequence omitted]

SEQ ID NO: 707 - protein, 150 aa, Homo sapiens
MVQRLWVSRLLRHRKAQLLLVNLLTFGLEVCLAAGITYVPPLLLEVGVEEKFMTMVLGESLHPPSFLFQIHATWHVGQEYLCPGSCLEGEVVCWEGIAGQEGDPGLRGHTKRKKRIPRTYPSHLWIPGPAQSLAHRRHWRNAPNLWLALL

SEQ ID NO: 708 - protein, 371 aa, Homo sapiens [sequence omitted]

SEQ ID NO: 709 - DNA, 141 bp, Homo sapiens
  misc_feature (1)...(141): n=A,T,C or G
tacggcgtggtgcggagggcggtaccccacaaataacacnnacaccccatcctatctgtgtccacanataaantgactcattcctctcctcgcatancccactntcccctngcgataccgtaacnaancccttcccccttt

SEQ ID NO: 710 - DNA, 196 bp, Homo sapiens
  misc_feature (1)...(196): n=A,T,C or G
cnatccttcncntacacccatgangtccatgtcgcacgtccacctcccctcaaaacttgggtccncatccacccgtcactctccccntaancnataaccccttttngcgaatagaccccaccttancaatnggtttttcnttttttgtccctnggnccgngcgattcaanaaattgaaggcccanaaaaaccccct

SEQ ID NO: 711 - DNA, 177 bp, Homo sapiens
  misc_feature (1)...(177): n=A,T,C or G
ntacntcnctccnaatgaaattcgaanctcggttacccgggggnattccgattaggngcgtantctcggatgtgcagtcacaagtcttttgctaatncttataattntcnctaccctttcttcnacaatactgctatcctanttnttctntcncctctctcccannttactaaccac

SEQ ID NO: 712 - DNA, 185 bp, Homo sapiens
  misc_feature (1)...(185): n=A,T,C or G
aaacgnaccanngccaacgatangtgttggngttggttgcggttgttcctcttatntgcactggttgtccgtgtcgcacgganggccacgtccctctgncntgagtancacatagcatccacgtttagtcgactntnccgggcggccgctctacccntntatngattcttattaaaantcggatc

SEQ ID NO: 713 - DNA, 172 bp, Homo sapiens
  misc_feature (1)...(172): n=A,T,C or G
nntggtcgcctgngcgtntactctaaaggatntactatncatatggantcnaanacgactcactacacggcnctctncggagccnnggtcagtgcctnctnggagaccttctctggggcaggangagcactnggtatgttcacgtatcncttcntaaanatacnnccctccg

SEQ ID NO: 714 - DNA, 112 bp, Homo sapiens
  misc_feature (1)...(714): n=A,T,C or G
nttgcgtgcctggacgtntactctgcangatctactactcatgngaattctaantacggactcactatncggcancgcaggcgcagcagggaangggtcacctcccagtctc

SEQ ID NO: 715 - DNA, 326 bp, Homo sapiens
  misc_feature (1)...(326): n=A,T,C or G
tactctanaggatctncgngtcatntggattctatntcgactcactctagggctcnagcngtcngccgggcaagttattcggatcgtcgggntccgagcttcgcaattaantgtgccatcgttctncaacgttcctgactnggaanccccngcngttcngatccncnggtacctagctccanntcccccgtnctccttctggngtntcatnaangaggaccnccctcgatcncccttccttaatctgcncacnctgaacgnccaatggacatngtgcgtttaatntannaggcccgnttcgngtgcccttcccgtnanntcagctc

SEQ ID NO: 716 - DNA, 122 bp, Homo sapiens
  misc_feature (1)...(122): n=A,T,C or G
nntgcgtcgcctgngcgtntactctagatgatctgantagtcatatggattctaatacgactcannatagggctctagcgnggatncngattcgtcntccngattcantgacnccggtanca

SEQ ID NO: 717 - DNA, 203 bp, Homo sapiens
  misc_feature (1)...(203): n=A,T,C or G
cntgcatgcctgcaggtcgactctagaggatctactagtcatatggatcgagcggccgcccgggcaggtgtnaatgataaanatgcatcatactancctacagaanggagagataatgttngntggaccangttggttttcttgcgtgtgtgtggcagtagtaagttattagtttttanaatcantaccgccctccgcaccac

SEQ ID NO: 718 - DNA, 168 bp, Homo sapiens
  misc_feature (1)...(168): n=A,T,C or G
ggcaggangatcncttgagccccngaggtcgaggctacagtgagccangagtgcactactgtnncgccctccgcatncacgngtggtccgatccccgggtaccganctnganttcactgganttctttttaancgtnttgantggtacnaccctcgantccctggctg

SEQ ID NO: 719 - DNA, 210 bp, Homo sapiens
  misc_feature (1)...(210): n=A,T,C or G
cancgtcgncataacacgtattttntgatnaagattctnactgacccatnaantctacntctcaagctcttncanngtccagtnaanggaatgtgtatnngtngggatnccacanaaaaaaganatntcggncgcttcattantcatccttcttacccanntctctngatncncagtntgancntgaacgcacactacnggatntctcca

SEQ ID NO: 720 - DNA, 131 bp, Homo sapiens
  misc_feature (1)...(131): n=A,T,C or G
tccatcctaatacgactcactatagggctgccaacctgccatccactactgaggaagacccgnanacttaggggctcactgcgagccaccggccacaggtcgtatagggcaaagcacgnggaagcacccct

SEQ ID NO: 721 - DNA, 121 bp, Homo sapiens
  misc_feature (1)...(121): n=A,T,C or G
tccatcctaatacgactcactatagggccgntgantnctggcgaaaggcttacaattaagnaggaaaaanganccaacaactaaaaaaaanncggncgtgncagcttngatgactngtcca

SEQ ID NO: 722 - DNA, 246 bp, Homo sapiens
  misc_feature (1)...(246): n=A,T,C or G
anctggagtcgcgcgctgcagtcacattgtggatccanaaaatcggcacaagctctcntggnttcntcgatatgaanaacactaatcccatgtngtntgngtctccgtgattcatccctcgcacnggtccccntccnaaccnttgcataggtgttatgttgtantctccccagtgcacaaagattnacactctctcantgtctganatatgcacgagttcattgtcctgtcnccgtnaacatcaag

SEQ ID NO: 723 - DNA, 160 bp, Homo sapiens
  misc_feature (1)...(160): n=A,T,C or G
cctccggaaaatccaantagagtaantncnctctaatccggggnaattggnggggtnnatacgtcctcctccccccagntaggattnanaaaaggnctcccagancaaaanctccaaagtgnatcnantagccgtncccganatncaacgcccctacgtc

SEQ ID NO: 724 - DNA, 156 bp, Homo sapiens
  misc_feature (1)...(156): n=A,T,C or G
tnanccnatatacaccaaattctgattctaaantcccacccaagggaaaaaagttgagaagagcctttccacttttctactaataaaaaaatgcaccagcccctaccannagtgnggaaaacctccttaggcccttgnntggaacaancgaaaatc

SEQ ID NO: 725 - DNA, 347 bp, Homo sapiens
  misc_feature (1)...(347): n=A,T,C or G
aganggttntatncatgctgtactcgcgcgcctgcagtcgacactagtggatccaaagaattcggcacgagagacggtgcgcgatggaccgagggccccagccggngaggcgccgccgccgagcccgcggncagacgccccatcagtagcgtccgcaccgggnagccgcggntctcgcccgagccgtgggcgcgcccgaggggcgggctcgcctcccgccgtccctcgcagctctgccgggcccgagcccgcgccgtcgccgccgccgncttgccgctcggnccgcgcggnccggnaaacgcggtcgaggtctggatgnggcanngcccgcncctntcgctgagcct

SEQ ID NO: 726 - DNA, 162 bp, Homo sapiens
  misc_feature (1)...(162): n=A,T,C or G
ttgggtgggttgggtgggggnaaatttncccatttgggtgggtttgggggggnaaatacttcccgccttttnggtncccaaaganacnaagggggagtcccttnatagaggnagngcgatncntcncaacnacntngactttgnccatggggagnaaggtgg

SEQ ID NO: 727 - DNA, 120 bp, Homo sapiens
  misc_feature (1)...(120): n=A,T,C or G
gtgtgggtggggaattccattgtggttgggggnaaatctccgcttgtccaaagnacagggggggtcncttanagngnagggggttcctccccaccacttgncttgnccattgngagnaag

SEQ ID NO: 728 - DNA, 130 bp, Homo sapiens
  misc_feature (1)...(130): n=A,T,C or G
gacccactgcagcgttnaacttagcttggaccgagctcggatccctagtccgtgtggtggaattccatgtgtcgagagaggggcaaatacnctccaanacancnccctcatgctcnacacatattcgcat

SEQ ID NO: 729 - DNA, 182 bp, Homo sapiens
  misc_feature (1)...(182): n=A,T,C or G
cngactgctngcgtttaaacttaagcnaggtaccgaacggggatnnacgactantgatcggctggctgcttccagtcgattanatttgtgaaaaagctgaaccncngccngttaagggggannatgcaaaanatncatccnnctgccccntaaactgntctntccnagggaaaaaanggaag

SEQ ID NO: 730 - DNA, 678 bp, Homo sapiens
  misc_feature (1)...(678): n=A,T,C or G
cactcncactccggacctaggcncttcaccactgctctcttcctcctcctcctcctcntcctcggggctgggggaccttccccagtgaccatctcactttggctgaancccactcggggcagcctgagtttggggctcttggccttctcaccctcctcggccccctccttggcccgcaccaggccaaaccggggcagccgtaccttgagcttgtgtccggcctctccctccccctctgccacctggtactcggcatggttgcccccgggatggcgagagctccacgtcgggcagtgagaagcagaaagtacgctcggcccctgggggctgctcctcagcaccctcgccccccaccctagctctggcccccagtgtgggcaacttcagcctcagcccaccctcgcctgtggccgcctcgcccgcctgtgcctctcggcttagccccacgtccaactcaagctggggcactgtcacggtgggcatcttaaagacaccctcacccaccagcagctcaccacctgcaacctgggctccaggcaaaaaaagggtcacctggggcanctgaaccctgtacctgctgtgccctctgctgaanggaatgttatctgaacctgctgccctgggggtactgccttcccaaaaccgggtcaantccacctgttggaaggnaaatncccc

SEQ ID NO: 731 - DNA, 135 bp, Homo sapiens
  misc_feature (1)...(135): n=A,T,C or G
gagatccgacgtcacccccttccggcggcccaagacgctgcaactcccgaggcngcccaaatatctttggaagagcgctcccagcccaacacaatggaattccaccacactggnntagtggatccgagctaagcc

SEQ ID NO: 732 - DNA, 660 bp, Homo sapiens
  misc_feature (1)...(660): n=A,T,C or G
gcttggtaccgagctnggatccctagtaacggccgccagtgtgctggaattcggctttcttcaatcagntnacgagctgcatggtctgctaacattgtcataattgctggcatagattactgaaaataaagaaaaaaaattgaagctgcctatcaagttttggtattatcaaaaacttcctacaagttattttacttcaaccatgttattacaaatattttaatgaatactttagagactttaattacaaaaaactgagatagtaaaagcaagtaataaaagctgaaattacttagctatttgataattacataaattattatggtccattcaacttttctagtgtttagtttatacaccaggaagactttcctattctactaacatttataaagtatgctaacctattatttaaacgcatccactattaggattttatggcctaaaacgtgatacagttcagtatcttgatgtcaaaactttttaagcaagtagggattaagttcaagtgaatgtgattttctttcttcccagtagggtcttctgaataactcagnaaagctcacttccattatcttactttataaaaaaatgctataagacagaatgggccgacgtggnggctccacctgtatccacctttggaggcgagnggcgaat

SEQ ID NO: 733 - DNA, 836 bp, Homo sapiens
  misc_feature (1)...(836): n=A,T,C or G
aattaatgactttttttccgccctgccaagctagtttgtctaaatataatgtaaagaaattagctactcattttctggtccacgaaggttcctaaaatgggaagaagtggagatctgaccttgttagttctaaatacactaaactgggagtgccatggatggctttcaggatgtcctgaatcctctataattgtatacaaaatcgtgagtttttaaaaactgggttagagctattggttcctcagagtctcaggcatcttagacccccaaaaaggttaaggactactgacttaaccaattaggtttgagtggcattggctttgaagaaaagcagaggaaagatatattttataattctgggcaacaaaaaagtggatgtgtgccagcatcttagagtagaatcctcttaaaaggatagcactgcatatgaactagtaggttttaaccagtgcatatttaggcgaagtagctcatttttctgttagaattcttttttatttgggaatgggcaagcttttacagcttttaccttgccaatgaatacctggaatttaaaaaatcttgttaggcatattgcccataaagttttttttcctagatcatatattcagtaaatatgtttgtagctttatttcaatcccccaattcattgagggttgaaacaatttgaatggtttgagtgtagaagctaagttatttctgtagaggctaagggcatttataccaanatatgttagacttgnggntcctgttaaccatgctgtanacaataggaattactgtatatccacattttaattttaacatcttctgctttgntgntggtttgagangga

SEQ ID NO: 734 - DNA, 694 bp, Homo sapiens
  misc_feature (1)...(694): n=A,T,C or G
nagtnctatttncactaaactgngagtgccttggatggctttcaggatgtcctgaatcctctataattgtatacaaaatcgtgagtttttaaaaactgggttagagctattggttcctcagagtctcaggcatcttagacccccaaaaaggttaaggactactgacttaaccaattaggtttgagtggcattggctttgaagaaaagcagaggaaagatatattttataattctgggcaacaaaaaagtggatgtgtgccagcatcttagagtagaatcctcttaaaaggatagcactgcatatgaactagtaggttttaaccagtgcatatttaggcgaagtagctcatttttctgttagaattcttttttatttgggaatgggcaagcttttacagcttttaccttgccaatgaatacctggaatttaaaaaatcttgttaggcatattgcccataaagttttttttcctagatcatatattcagtaaatatgtttgtagctttatttcaatcccccaattcattgagggttgaaacaatttgaatggtttgagtgtagaagctaagttatttctgtagaggctaagggcatttataccaagatatgttagacttgtggttcctgttaaccattgctgtagacaataggaattactgtatatccacattttaatttttaacatcattctgtc

SEQ ID NO: 735 - DNA, 126 bp, Homo sapiens
  misc_feature (1)...(126): n=A,T,C or G
ncnttgaaacnggttgaccagacttcaggcctgtgcgctcaatcgtggagaatctcgtgccgaattcggcacgagtctctctctctctctctctctctctctctctctctntctctctctctctct

SEQ ID NO: 736 - DNA, 165 bp, Homo sapiens
  misc_feature (1)...(165): n=A,T,C or G
cagaagcctttaaaccggttngaccagacttcaggcctgtgcgctcaatcgtggagaatctcgtgccgaattcggcacgagtctctctctctctctctctctctctctctctctctctctctctctctctctctctctctctctctctctctctctctctctctc

SEQ ID NO: 737 - DNA, 125 bp, Homo sapiens
  misc_feature (1)...(125): n=A,T,C or G
ggnagcccctttaaccgtttgtccagacttcaggcctgtgcgctcaatcgtggagaatctcgtgccgaattcggcacgagtctctctctctctctctctctctctctctctctctntctctctct

SEQ ID NO: 738 - DNA, 137 bp, Homo sapiens
  misc_feature (1)...(137): n=A,T,C or G
ggagncncttgancaggatgaccgacttcaggcctgtgcgctcaatcgtggagaatctcgtgccgaattcggcacgagtctctctctctctctctctctctctctctctctctctctctctctctctctctctctct

SEQ ID NO: 739 - DNA, 970 bp, Homo sapiens
  misc_feature (1)...(970): n=A,T,C or G
aggcctatttaggtgacactatagaacaagtttgtacaaaaaagcaggctggtaccggtccggaattcgcggccgcgtcgacggcccttngtgccactagntctttcattcttcccccccatcaatcagtgaactttttagcctactcaaagctttgctccaatgcataggatttatgattgtggggatttccagataatataaatattcaacatgaatattttaaattaaggcatgagacatttttcctaactgagcatagccatgaacctctcacgtctgttcctctgtgtcagtttgtancactgaatacagcagccctcctaaaagtccaggcagtgcacaggtcttgacatgatgaagtgacgtgttgctatggtgattttgcagctggccaaatagtcactggttgattttacccagcaggagatttttgcaaaaatttcctgggtgagagtgaaatcaaactcctattttgnttctcctctgcaagctgnagttaagatggattaatgagtacttttagattaattaactctgaagagaaaatgggagaaaagtgaggaaggttgttggcagaagtcattgctggaatccttctgaagggagtactgacttcacttgcaaagacnagagactanaagacaatgaagttaaacttggcctgtctctcatatgatagatgctgagagtcaggntcagggaaatttaattctgtcatacgcatatnggattatgtggtcatggatttgttggcactaaccngcctntaatcagnataagaaaagtgttttggtaganaaagaaaattatggcccagaaaaacctggaanacttggaaaaaatgntngggggccttgggtggtggtctnaaaanaccccctggggatntttaaaccaaaantgaagaagggaaaaatntttccccntntttttnttttttgcccccttgggattggnttttntttcc

SEQ ID NO: 740 - DNA, 739 bp, Homo sapiens
  misc_feature (1)...(739): n=A,T,C or G
gntgtcnaaaaagcaggctggtaccggtccggaattcgcggccgcgtcgacggcccttggtgccactagttctttcattcttccccnccatcaatcagtgaactttttagcctactcaaagctttgctccaatgcataggatttatgattgtggggatttccagataatataaatattcaacatgaatattttaaattaaggcatgagacatttttcctaactgagcatagccatgaacctctcacgtctgttcctctgtgncagtttgtagcactgaatacagcagccctcctaaaagtccaggcagtgcacaggtcttgacatgatgaagtgacgtgttgctatggtgattttgcagctggccaaatagtcactggttgattttacccagcaggagatttttgcaaaaatttcctgggtgagagtgaaatcaaactcctattttgtttctcctctgcaagctgnagttaanatggattaatgagtacttttagattaattaactctgaagagaaaatgggagaaaagngaggaaggttgttggcagaagtcattgctggaatccttctgaagggagtactgacttcacttgcaaagacaagagactanaagacaatgaagttaaacttggcctgtctntcatatgatagatgcttgagagtacaggntcagggaaattttaattctgncatacgcatattggattatgtgggtcatggctttgtttggcncctaacc

SEQ ID NO: 741 - DNA, 1171 bp, Homo sapiens
  misc_feature (1)...(1171): n=A,T,C or G
gccttgnggtgacactatagaacatgtttgtacaaaaaagcaggctggtaccggtccggaattcgcggccgcgtcgacggcccttnntgccactagttctttcattcttcccccccatcaatcagtgaactttttagcctactcaaagctttgctccaatgcataggatttatgattgtggggatttccagataatataaatattcaacatgaatattttaaattaaggcatgagacatttttcctaactgagcatagccatgaacctctcacgtctgttcctctgtgtcagtttgtagcactgaatacagcagccctcctaaaagtccaggcagtgcacaggtcttgacatgatgaagtgacgtgttgctatggtgattttgcagctggccaaatagtcactggttgattttacccagcaggagatttttgcaaaaatttcctgggtgagagtgaaatcaaactcctattttgtttctcctctgcaagctgtagttaagaagggattaatggagtactttttaagaattaaattaacctcttgaaagaagaaaaaatgggggaagaaaaaaagtggaagggaaaagggnttggttttgggccnaaaaaaaagttccaantttnggcnttggggaaaaattccccnttttccttggnaaaaggggggnaaggttaanccttgggaacctttttccnnccttttnggcccaaaaggggaacccanggggaaagaacctttaggnaaaggaaacccatttgggaangggtttnaaaaccnttngggcccccgggccctcctccaanaagggaaaaaaaaaggcctggaaaangtaccagggtttcangggnaaaanttaaaattcttggccaatancnccataattgggaattatgggggggccatgggcttttggtttgggcncttaaccccgcnttttaaattcaaannaaaaaaaagnggtttggaaaannaaanaaaaaaaattnaanggncccnaaaaaaaaccctggaaaacctttggaaaaaaattngnnggggggccntttggttgggggggtttnaaaaaaccccctngggggttttttaagcccaaaagggggggaggggnaaaanggtncccttnttttttttttnngccccccttggggaatggnttanttcanggggccc

SEQ ID NO: 742 - DNA, 739 bp, Homo sapiens; identical to SEQ ID NO: 740
  misc_feature (1)...(739): n=A,T,C or G

SEQ ID NO: 743 - DNA, 610 bp, Homo sapiens
  misc_feature (1)...(610): n=A,T,C or G
ctgtccttatttctttagcaaaaatttcccaagagaagaattgctgggataatgcacatttaaatttttgatagacattcccaaatattatacctgtttttgagacctttaattcctgttgtcaaattgccctatatatggagtaataaacacgatttaaagaaatgaggactaaaaaaagattatatataacccaacataaaggcaacctcttaggcgttgacagaaactgacaactttttatctgtgggtgcgatccattataagtaacctgagcaccttattttttctttttaaactctaggtaggatacccgaggtccacaaatttttcataagaaatattttttctctgccctatgagattttaaaaaatattatactgcttcaattgcatcaaaagaaatggaccctaatatctatgatgaaggatttggagttagaagacctgagtttcaattttggcatggctgtttgtctagctctgngatcttggacaggtcaattgacttggcttaatcttctcatccatttagnggagacagcaccactattcacaggactattgncngaattaccagacaatagcataggngaaaatataangcctt

SEQ ID NO: 744 - DNA, 127 bp, Homo sapiens
  misc_feature (1)...(127): n=A,T,C or G
ttnacctccctggaccgggccccccttccccgggcggntcccccgggctgcaggaattctgcacgagggagagagagttngagagagagagagagagagagagagagagagagananagagagagag

SEQ ID NO: 745 - DNA, 458 bp, Homo sapiens
  misc_feature (1)...(458): n=A,T,C or G
gatatcccgggattcgcggccgcgtcgacgtggcctctagtttgtcctggtccaaagcagggaagctgggctacgtcctgcccaggtcagccttaggttaagggctgcctgggggagggaacttcctgggccttcgggtctctgtgcactggggtggctcctgtggcccagaatgccctggagaagggtcctactggaagcgaaggtgcagggcagcagggcctgaggcgcaggagctggtggaggctcccagcacaggtcgccgccccagtcacatcactgctgatggtggggggacttggggagtttcccccgagaatgggaggtctcacagtccccgtgctgcaatgctgtcggtgcactgngncngcaatgtgctcatggncacttgctttttctctgtggccccggccgatttatccagcanngcacccctcttctnctctccgganaaagcc

SEQ ID NO: 746 - DNA, 893 bp, Homo sapiens
  misc_feature (1)...(893): n=A,T,C or G
aagcaggctggtaccggtccggaattcgcggccgcgtcgacgtggggagttagctctctggaccccgtcatagagtaagtcatcgatagagcatttgcttgatggggacttccagaaggccanngaaagtcctgccgacttcctggggaagcccatccgcacgtggggtgagggtccccanatggaagcagctgtgtatgcagggagggggcagaggctgctgccaatgggcatgtcccttacctgaaagggccacctctccaggtgacatgtcctgggggagccggggccgtctgctccggccagaggcgctcagctcaggccacaccaggcagggcacctcccaacctggacaggtggggaccaaggtggccttggacaaaactctctgtgtttgccaagcacccaatcggacacagagagtcaaccacaccccagtcacatggtgtccacacngcaggggtcaaggaggcccggcccctccccctcagacgtccctgggcctctgggagtcagcaaggacgaggacggcattgcccttcgagacaggaagggagtgacctcctcccggcggcatccaggctcngcttctccggagaggagagggggctacttgctggataaancggccggggccacagagaaaaagcaaggtgaccatgagcaccttgcaaacacagtgcacccaccagcatttnagcaccngggactgtgaagacctcccatttcttcggggggaaacncgcccaangttccccccaccntcactagtgnattgtgacctgggggncgggccgacccctgtngcttgggnnagccctccncccaggtttctnnggcngcccnttaanggnccctngnttggccccttggccncctttncgcttttccca

SEQ ID NO: 747 - DNA, 738 bp, Homo sapiens
  misc_feature (1)...(738): n=A,T,C or G
gatatcccgggaattcgcggccgcgtcnacgaagcacagacctgngccctgctctcatggggcagactgccatttgtcattnattactgaaggaaagggatcctcagtttgcttgtggacatttcaaatttgaggtgagagttggataagtaagaataaagctgctcttcaaagagatgaatatagaaaaagaaacaagatacagncttggcagtaaggctgggaggaaggggaaaaggtaataaagaatgaaagagtgagaaatgtgagcaggagctgaacacagaaaagttcagngacagaagcanaaggagggaagaagggaggagggtccctttcacagaggctcacgaggatgctttatgngtgccatgcagtccatgttcaggatgtctgcttcttanctctctacttttctaatanaaatttggatacttactgatcctacatatgtaacagggagagaaggtgaatttcaaagcantaaattgaaaaattgttcacaatttcattttttaaaaaaagggagctaacagaagaagaggttaatgtggtaattataggatgnctcttgcgacacatgaatgnatctggtatcatctgagtgggaggggagctgtcttcctgacccaaaaggatcctttcgttanccngnacttangtcccaaaacctcaccaccttggagaaatnatttccttttgggggtntcattaaanccttttggnccccgcaaaagc

SEQ ID NO: 748 - DNA, 647 bp, Homo sapiens
  misc_feature (1)...(647): n=A,T,C or G
ctntgtggcggtggctgtctcatttgggtggactttttgggtcgtaggaacctggtatngaggtcgagagtaagacgggctattagtagtcgcatcggagttatttgtgaaaacctggttagggcctctgtctccgctgcgctcgcctaaattggtatggctcgacttggaaacacggttctaacacgcgttgttagcgcccttgctagcatgtgaaggacactggccctaccaagaaagattcgagtcgctccttccggtatcgttcacggaggcgatatttactcttcttactacggttacttcgagattgtctgtgaagtttaagactactaaaaagagtattaagcctatcgggaattagctagatcgacacgctaaaaccaagggcaatcggcggaaatatagaggcaccaataatagggcctacagaaggcccgagggttagactcacgtttaataccggccacgggagaaataaaaagataaagtatacatcgtttagcggtcctcggaagccttcggctttaatgccaaggagtcggaagcatcgtcggcgagtaataaactccatcgcgccgagactatctacgacgccctccttaanatccgtaaattactcccggaaagagtatttaggcggctct

SEQ ID NO: 749 - DNA, 642 bp, Homo sapiens
  misc_feature (1)...(642): n=A,T,C or G
ctntgtggcggtggntgtctcatttgggtggactttttgggtcgtaggaacctggtatgcaggtccgcggagcgtgggctctcgtcgtggatgttgggggttggtgtggtgccggttgtttttggttctgttgagcgtagtgtgtttgaaggttagcgttcgtgtcttgcttgtggtttggtgtttagggcgggtggggaggttgttgtgtagctgttgtatgtcatattgttggtgttgctgccctgtgctgtttgtccttggttattgtggttgttaccccgcctgtgtggaagtgttgtggcagggcgggaatttaagtgggagagttgtgggacccgtggttgttgttacgttgctgcttttgtcgtgggcggtggcggcgcgtctgataattagaattggatacggagtgtataatacttctagtaaatggggacctagtgcttgacttcccggaatagggatctatgcgaagtccttaggatagtctttgataagtttaacgcccacgaccctaaaattatacacgattagacgcataacgactcctccaggaaagataaagaatctcacatatagaacgggaccccatacacgtcggataggaaacaagagaactaattttngttaaaaagactt

SEQ ID NO: 750 - DNA, 639 bp, Homo sapiens
  misc_feature (1)...(639): n=A,T,C or G
tttgtggcggtggtgtctcatttgggtggatttttgggtcgtaggtaacctggtatngaggtatagatgccgattggtcccgacgagcgtcacgataaattcggtagtttcgccctttttagaaggcgctagtactcggaacttcacttcatctcggtagtttactttggcgtatatagccttctccctcgaagactagccgtcacattcgttccctaggaatcgtttctgcccctaagaatccgagagcgagatcccgaaactagaggaaccttagaagagtcgtatttccacaaggaccccacagtcattccgggaaaatccctaggaccatacggttaggattcccccggaacccggagcaaagctcatgatttcccacaccgcgagagcgcctataaccctatcccatttcttcgggttatcgaggatattacgatcaagccgagagaaccgctagaaccgctttcttcgctttctcacggaacctataagtagaaagagaaactcaggtcttaagggggcgcttcggctaacgaaacttctacttacgaagagagtatctagacattaagtcataaaaatccactacgcacctcgtgtacgatatcatcgggagcggttcatagacggtgtccg

SEQ ID NO: 751 - DNA, 637 bp, Homo sapiens
  misc_feature (1)...(637): n=A,T,C or G
cttttgtggcggnggtgtctcatttgggtggatttttgggtcgtaggnaacctggtatngaggcagctctgagcccccccccccccccccccccccnccccccccccctaggnggttgggaanacggtggatacctaaatcgagtgngttcattaaaagtagttgattacnccctaaaataanaanagggcttcgtcggganaaatcggtaagganaagtctttntggcatcataanaatactggctcgggtcctaanatntttaaggnggtcnccgagggtnttcataccgataanaaacgttttcctatcggcaacgggcttacctgagggnggacttctcncggngcggngattnanacgaanacgtagaggattnccgntacttnttganatcacncgtatcatacttgtaagcataattntcctgaaaagtgttataanaatacgcncgcatattcgctttttcgtcctagggatgcttaaatggcgatactgctatagcgggtgagcgttggttctcgagnaanaaagcgtgtcctaatgcgtctaaggntttaaggncgttggtttaaaaatanccttagaaacctcgaggcggatactggtttntttttaacgaaacaaagcaccccnn

SEQ ID NO: 752 - DNA, 644 bp, Homo sapiens
  misc_feature (1)...(644): n=A,T,C or G
tntgtggcggtggtgctcatttgggtggatttttgggtcgtaggaacctggtatgaggtcttgcgagttgttggtgtgtcctgtcgttcggtggttcccttttgagttgagtttgtcctttgaggttgttagctgctgttcgtttgtgttcgtgtagtgctttgggttgagagggttatggtggtggttacggtgtattgtcgcccgtggtcgcggggttggggtggtcgtcggttttgtggttcatagtagtcttctgcgttcggtggtgcgggtttgggtgagtagtttcgttcttggatgtcccattgacccgccataatctaagtaagggttagtagaaacctctccccgatagacacaaccgtcgtccactaaagacctcgcctctgatttttaaaaggacccgaaaaacatcccttcaacggaaaaaacggaaaaaaagtcagcgaattcaaagaagccacgggagagaaaaaagaactaaagttagtccgtcattatatgtctcctcggaggaggaagcggcggtggcggaaaatgaggcggtaagaaagacgacctctatcggcggcttangccctaaaagggcgataccttacgggatgataaggaccctaggacgcctccttctcggatcgtcc

SEQ ID NO: 753 - DNA, 635 bp, Homo sapiens
  misc_feature (1)...(635): n=A,T,C or G
ctttgtggcggtggtgctcatttgggtggatttttgggtcgtaggaacctggtatgagggaatcagctcgacccccccccccccccccctccgaagcagagcccaacccaaagtccaccgactacccgagtaaactctcggagggtagaataagaaggagtaggtcctagccaatagaagtagttccgagccgttaggacagcggacggaacattnaagaaagagcctatattagggaggaagtaacgttcctctttcggagctctttaaggggtagtcccagaacaagggaagaggacccgtcggctattgcccgtcgatacgggctctcacggngagcctaggttcgaggatagggccgctcgtaaaattatacggtttccgagaaacgcttccgtagaccgggtcctaaatcgtccggagtattnggagagggatccttcggaccctagggacagagagaggagaacggaggttacaggaggagaacgtntcctcnctagttttctttangtcgaaaaatttcttaccgatagggttcctagggtcggngaatttacggttcgaaaaacggtagtncctaanggntgntattnggggtagtatcgggtcgtttacaantcgtccgtcttntg

SEQ ID NO: 754 - DNA, 721 bp, Homo sapiens
  misc_feature (1)...(721): n=A,T,C or G
accggattngttnctgagcgcgtgactgctaataaaaaagatggantgccatctttttttttnccttgctttatatatccagcagcaaaacaaaattgttctgcngggctataaaatttggcttgtgagtcntgtacacaactcaggagtgtgacacagctaccagctttcctcctaactctcaagggaagaaaattcaagttctgtctaggctcactctgtaaagtgggaaacttgctggttttgtaggctttttttccccttctttccctctctcagcttctccctgcttctcagaanatggagttgtgatgcctgcaacttaccaaatttatctatgaatcagattccagtgggagacccctaaagcagagggagaataaggagttctccccatgatggaaaatatccaaagacaaggtttcatggagcaaagaattctggctagatttggtttgtaagtggatccctccccactgcgtgtacactttatctgtctctttgcttcttccccaccctctttcccagctctctctctgtctctctcttgntcccctgacccttttttcttcccantgcatacttttttntttcccttttttaatcttctatantcttaancctaccaangggccctcntgannaatttntcacccctgaataggggattctntangccctgagaatttcnttatcanaaaaatatttttttaaagcatta

SEQ ID NO: 755 - DNA, 721 bp, Homo sapiens; identical to SEQ ID NO: 754
  misc_feature (1)...(721): n=A,T,C or G

SEQ ID NO: 756 - DNA, 873 bp, Homo sapiens
  misc_feature (1)...(873): n=A,T,C or G
ggaagaatacagtaagtttgcaaattaaaatttctctatttttctgttatttattcatttggaaactgtcagcctgtctctttcactttgggcaagtgaaagcaaagacgtccagtcctatcagcaattaggctgaaagtcaacgccaagctggcgggcaagggctggtctgagtagaggttccctaggcaggcaagagagagactcccactcgatactcccagctcggcaactgcctgaatgccaatgagcactcattataacccgccctattttataggatttaattttacacttcaggcttaatcagtctgaaagttaaactgacagtgttaagttacggaatcaatgacatttaggctttatgactttgtagctgaatatctatgggctatatttccattctaacagtgatatcctgttccagaatctcattctttggtgatggcactttctagtggagcagtcatggtaacagtccacacccattaccatgtgggtgctttacagcatactgacggaaggactgaggagccaccggagcaggagttcctctcagggaggacgctgacacttccacagctgcctangtatgggcacctgatgccaacgaanaacccaaagcgctctcccttccagatggaagctgccccacactgggctgacagcatctggagctgctctggctcaaatcccggaatcgcacanctcctancgggggcgtttanagatcctcngggccagctaccgaccacttttgacaagggncttaggagcgataactagnctggcgcgttacacncggatggaacgtcttggacttgagacctcttggggganatggcncccccaaataanttgggaaaantnggg

SEQ ID NO: 757 - DNA, 782 bp, Homo sapiens
  misc_feature (1)...(782): n=A,T,C or G
ggcccctcgagggatactctagagcggccgccgactagtgagctcgtcgacgatatcccgggatttgagaccaggagacagctccagatgctgtcagcccagtgctgggggcaggcttccatctgtgaagtggagaggcgctttgggcttcttcgttggcatcaggtgcccatacctagggcagctgtggaagtgtcagcgtcctccctgagaggaactcctgctccggtggctcctcagtccttccgtcagtatgctgtaaagcacccacatggtaatgggtgnggactggtaccatgactgntcccttaaaaggtggccttcccnaagaaaggagaattcttggacnagggatttcacttgnttagaaatgggaaaaattacccattagaattttcgnttccaaggcntnaagncctaaaaggcctttgattcccgaaccttaaccctgggcagttaacctttcaaacgggataaaccctganggggaaaatnaaatcctttaaaaaagggggggtttnaaggagggctctttggctttcaggcanttgccaacctgggaaattcanaggggaagtntttttttttgcctgcctagggaacctttacttaaacnaacccttgnccccccatttggggttgactttcancctaattgctgaaaggaccgggccgnttttgntttcctttgncccaaaggnaaanaaacgggtgccanttcccangggattanttcccgaaaatttggnnaatttttntttgnaactttttgggttttttcc

SEQ ID NO: 758 - DNA, 647 bp, Homo sapiens
  misc_feature (1)...(647): n=A,T,C or G
ntttgtggcggtggtgtctcatttgggtggactttttgggtcgtaggaacctggtatngagggaagagcgccgtcggtccgagtacagtatggagtagtatagtcttcgcgccttctcgggcggcggggctattctctccaaaggcagaggtccctagtcgacctcgctcccctaggttaggaacagccgtcgaatattttaggttcgtcgaggctttcttccgagctctacgcctaagtagctccgcgagcaaagtatcggtcattttcccctatccatcactcccctaagtacgcctcattattccggaaggcaagaggccagcattcctccttagagtagagggtaggtacctccgtcgcgtgccgcgaaagggcagagcttcgtgtcttccctccgcagcagcttaacggtctacgtaggcgttctcgatcttttcacgggaatcggggtccgggagggcggcggaaaacgtcgacgtctcggtcaccgtcaccgccccgaacaactagcggctttccgctttcaactgaggaaccccgcacccctcattagcgcttacgaaatcggggangtgattgcgccaattcgttagccttcgataattattctctattagcggtcctatctcgcgctttcgatttat

SEQ ID NO: 759 - DNA, 657 bp, Homo sapiens
  misc_feature (1)...(657): n=A,T,C or G
ctttgtggcggtggtgtctcatttgggtggactttttgggtcgtaggaacctggtatngagggctctatagaaagcctcttgtctttagatacgggctttctggtccttcgttctggaagtgtagtagtaggtactgcgggaaggcgaagagtcctttcaaggacgatttacttaagttggcttattctatagttccttcgggacataaggtcggtacgatctatactgcgtgggaagctgataggttgggacttaaggcgaataagaaggaggcggcggaggtcgcgattaccgcagagatattatttacggcggccgcgggtaccgcgggtcatgcggaaattttctgaggttcttggattcctaagatcgctcccgtcgagtatactagcgacgaacgtaagagtgccctcacaagaaccggtacaaactcaagaagaagttcccattaagcatcgtaagaaacggtaggacgaggacggtaagaagtaatcggagaaaggatcctagtngttacgaagaagcatcgttnagctactttgcgctaccgtttatatttagacgtgttccgtccttctccgtgtttanaaaaaaggtttattccgacgggagacttaggcgaatggagggttccgcggttganaatcggancgggg

SEQ ID NO: 760 - DNA, 644 bp, Homo sapiens
  misc_feature (1)...(644): n=A,T,C or G
ctttgtggcggtggtgtctcatttgggtggactttttgggtcgtaggaacctggtatgnaggaaaagaagtaagcctcgaagcctatctccgaccgtatttatttcgcagaagacggaactacggacgtcgttaaccccgagtagcccccgtaagaaaggactaaagcgaatggaaaagtcgggaattccggcggaggggcggcgattactgaaaggagtaagagtaagactattgcgatacttgaggcgttccctcttaaaaggcacccgaaacactctattaaaaaacacccgaagaagaacaactcatgcgatcggccgtgtgcagccgtcaatagtaaagagagccatgaaccatgccatccttagaccaattaggatgaagaagaggaggaagatgaggaccaaaccctacccactcggaaaaccccgcacgagcctccgaacaaaatccgggaattaaaacggcggcccacttccgcactctcgtagcgcggaccgaatagaaaaccggaaactacagctaaagggtcctttccggcctgttatctacccacccgcaatccgatcctccccccccctcgtccaaaaaccctaacctctgcggcaacattagagcagaaggagagggcgatcccttgan

SEQ ID NO: 761 - DNA, 647 bp, Homo sapiens
  misc_feature (1)...(647): n=A,T,C or G
ctttgtggcggtggtgtctcatttgggtggactttttgggtcgtaggaacctggtatngaggcgggtactctctgggataatcggtataagtgttgtaaaattgggggtaagagaaagtttcattataagaagtggaagcacgagccggggtgtttagtcgttaatattaagaccggtttttgttgtacttatatagcttgcgcgtggggaggcaataagaaacattgcgtttcgaggccggatgcggggaaccctcttcggggtctagagcgccgcatctgcaaaataaggactactgacgccgctcataacgtactcaacaatgagtcggcctgcattaagatttcggcgaagaaccgtactgcgtctactgatagtatattgcattgatagcggcatgagctttatcacgtgtcgttttcgggttgtaagaagggagttaagtcgatcttcgaggaagaagagaccccaaataaaaaatgactcaaaaaaacctagaagaaacacgacgaaaggaaaaagaacgttaaaactagtagctcttcggangagtagccttagtagggtaagtcctccgtgcgtactgtcctaaggtttggatagcgcggttgaatagacggtcacgcgtcagaaggtaaaaanccgg

SEQ ID NO: 762 - DNA, 628 bp, Homo sapiens
  misc_feature (1)...(628): n=A,T,C or G
cattgtgttggggtcactgagcccacttttttccagattttttgtaaaattgtttcgcattgtgttccctttattcgcttgtattaatatttgcgtagtggattaaacaaatacttggtgttgactgtcagtcttagaggactgactagaagtagttttcatttggggctcaggaaatacctactttatatttctagctaattaggaaagtcatttttcagttaggttggtgttttggttcaggcactcgctagctagatgacctaacatgctacttaatttctgagtgtttgtgtccatccctgtaggattgttgcggggttaaatgaaattgtgtatatttgtaaagcatttacctcagtgcccagactgtgacagagtagattattaggcttgctcttatttctgtgattaaatttagtgtcagattagcaacctatagctacttctaaagctgctgctgctttctttgtttagggttaggaagaaacatgctggacagtttgccaaatgagagttacatgatgtggcttgtgggaacattctaacttggaacttgcccatttccaggactttgnggttcanagatttttggggatagatgtaagggttaaaaaaaacngaaaac

SEQ ID NO: 763 - DNA, 147 bp, Homo sapiens
  misc_feature (1)...(147): n=A,T,C or G
cattgtgttggggcagagataaataattcctctgaaaagtgttttattggaatttcaaatgaaaagctaactggataacttacagcatgtttctgccaataatctcttanaacaggcctcttttttttatgcacaccaccttcnggc

SEQ ID NO: 764 - DNA, 146 bp, Homo sapiens
  misc_feature (1)...(146): n=A,T,C or G
cattgtgttgggtatgttttttgaaggcaggtggacaggatttgctgatgggtaaatggcagagttagggggactgttagaacagagaaaganatcatggggttgggtttgagtctgatgnnnaactggtgccgnntgctcagtat

SEQ ID NO: 765 - DNA, 129 bp, Homo sapiens
  misc_feature (1)...(129): n=A,T,C or G
tncncgattcgntnctagcgtntacactnatgtcttggtaccgagctcggatccactagtccagtgtgggnggaattccattgtgttggggcaggaggngctttgngtacngtgcggctgnagaggcgg

SEQ ID NO: 766 - DNA, 175 bp, Homo sapiens
  misc_feature (1)...(175): n=A,T,C or G
cattgtgttgggcctagtccgaatacttttagtaacttcagacagatctcctcatctctttctggggcttggnttttctcctttgtanaatgatgcctttctgtggttttgtcatttctaacattctgtgngtgatgaggtgtatattcganganctctatcnccanagtactct

SEQ ID NO: 767 - DNA, 602 bp, Homo sapiens
  misc_feature (1)...(602): n=A,T,C or G
nnntttaaaanctgtnctccccgcggtggcggccgctctagaactagtggatcctttccacctggtttgttttcagtgtttaatcctattagtatcagcaggatataggtcaggatatcaggtgcagaacctgtggaatcagccaatttggcttgctcatttactttaataaggtcccataatgagtgagagtacaaagttcaagccctgttgagggtctgcattaaactctcagaagtatttagagtgtgccaggagccgcgaaggtctggttcgggtggtggcgggaactgtattagagtgctaggcacggcgcgacaaagtctgtccaacccaaaacggtgctgaggcgttgggtgtgagctccagtactcagaaaagcatctcagcaggtactcaacagatcctcaggggcttgggggcccagcactggcagtgagggcatgaaagacataaaagggcactacctgtgggtattttctgttctccaaggaggaagtagcaaaaattaggacgctggaatatcctatgttgtagcaatcccagaacaactgatgctcaacaaataccacacaaaacaaattttttaaaatttaatctta

SEQ ID NO: 768 - DNA, 671 bp, Homo sapiens
  misc_feature (1)...(671): n=A,T,C or G
tccaccgcggtggcggccgctctagactagtggatccactagtccagtgtgggtgggaattcgcggcncgcgtcgacaaaaatactgctaaagtaatatttttatagatgactatttgccttggggccaggaaaagcagctggagttattcacttagtaccatttttacatactaactttgccttttccatgcttgcttgatgcggcttgcagcactgaagaacagtttcaattgctagccaaccagagagcatgatcaaaccaaacaagttccctgtttcaggaaaaacaggttttaggtaactgaagggttaccagttactgattccacaatcttctctgtaaaanatttctgcctattatgcagactgggcggctttaaanntggtaaaactatnaaatacccatacaatattttaanggggccccnttatnaagcttttcaggccttcccctttccatagcattggtgggatacaagaaacctttaaacagcaacnagctatcnaggcccaaaaggaaagtaattntgattttttanagattccgnaacgaaaaaatggctgggttcaaatacnaccttctttttaaaatggnttccttattaaacnttttttttttttaattttaccccatggtcntgatnttngngcttccgcccanaaaatngn

SEQ ID NO: 769 - DNA, 877 bp, Homo sapiens
  misc_feature (1)...(877): n=A,T,C or G
aaagctggagctccccgcggtggcggccgctctagaactagtggatccactagtccanngngggggaattcgcggccgcgtcgacctctatacctttgntcatgcagcttcctctgactgggtttgttcttcacttggctaacccctcttttacttaagcacaccttgaacattccctccttccccatttccccgcagngcccctaatggacatacttctgaataacacaggtggtattccttccttgttggaacctcctggaggaagagacagatgattaacaaatccttccatcaacccctttgaccatgacatcaacagtgctccaaattatggggtaccgtattagcctatgtctatcttgatcagaatccttacctcggtgtattgaaattatctatttcgtgcctgcctctttaaagtcagggtttgccttatctattgtctaacaccatgcagtaggtaacatgcagtaggaaacatggcattaaattatttgggttcaaatcccagttatggtgtgtaaatgcctaccaggccgtgaggcacctgctaagcaggttgcacgcatcatttgaattcacaccacccttttgcaatagaacagataggcaacagaggctcatttgggctaaaggatttgatggaggggaagtgccaggattcccaccaaggcctcanggcccaggtccanggaccatgtctgttgtgacaactggagtgcatttcatatcccctnctctgnggggnaaggtccctcncgnggagaacnnttaaaacaatcatntctngggggnttaatgcttcttnccccagtgtggtncactgcngccacgagtcccanccactagtcccangtctgtcatgaaccanccc

SEQ ID NO: 770 - DNA, 874 bp, Homo sapiens
  misc_feature (1)...(874): n=A,T,C or G
ctggnctccccgcggtggcggccgctctagaactagtggatccactagtccagtgtggtggaattcgcggccgcgtcgaccttttcaaaggttaacttatttaattatcacannngcaacccgatgagtaggtaacagtattttactgataggtaatctaaagaaggaggctaaataaattgcccaatttcgaacagtgagaggaagaattaggattgaaacacatatagtggcttcagaatctgtaaccctcacgatgccactactacttctttcagaataccctttgcctatctattctgttcctatgtcatcaaattatacttactttaaaaagtatttgtctttattatttttaaaaaaacacagggaagtatttctgatcaggggcagtattggttctgaaagacaagccagtgtttttgagggtttctcccttgccagtttttctatgctgggttattcaagtcctaagaattgtgtagctattacagaaccgctttagcaaatgtgttccattaatcaaggtgatttataacaaaatttcatccaagtttggagtgctctgaaaacatagccaaaatgttcgcagggtctacccctctcgtgtgtcccttttttttagctatttcagaagcacactggtgcaatattttacgaaatgagtttcttccccttacctctgcatcctctaagaaaaaatcattgntgttttatgaanatgaanatcctgctatttcatatcttgattggagctgcttaattaaatgaccattttnaaatttgttttgattccnngcaaaaaaagtttnttnttggatgtagggggctcnnaaagnccaaaaccccccaaaatttttnnttgggaacccna

SEQ ID NO: 771 - DNA, 156 bp, Homo sapiens
  misc_feature (1)...(156): n=A,T,C or G
ttaaaaanctggnctccccgcggtggcggccgctctagaactagtggatccactagtccagtgtggtggaattcgcggccgcgtcgaccgcgagcggtcgcccttttttttttttttttnngtttttttgaanaattcattgggtatttattattc

SEQ ID NO: 772 - DNA, 586 bp, Homo sapiens
  misc_feature (1)...(586): n=A,T,C or G
ncaanctggnctccaccgcggtggcggccgctctagactagtggatccactagtccagtgtggtggaattcgcggccgcgtcgatcacaaagtgctcacaagtccngnatttattttatctccagatatgaaacttacccccagctatggtcttctatttgttatttaatttctaggccaattttttccacttgaatgtcagtattttaattcaaagtcaccttgtccaaataccaagtcatcaacttaccctcaaattatatcctcattcagaaaatctacatctattaatggtagctattttatccctgccccctgctttttctttttatatttaattaatttgntcatccagcaaatgcttattgagcaggtattgtaggctaaacaattctanactttaaggggacacagnttgcaaaacaaaatcctgccttgnatggatacttatgnnatggngggatacagacaatcaacataatgangngcatcatatataatggttagnanaatgataagggnttttgggaaaaaaatgcacccanccaananggattgggaagtgganggganggtcangggangg

SEQ ID NO: 773 - DNA, 2983 bp, Homo sapiens
agagatagagtcttccctggcattgcaggagagaatctgaagggatgatggatgcatcaaaagagctgcaagttctccacattgacttcttgaatcaggacaacgccgtttctcaccacacatgggagttccaaacgagcagtcctgtgttccggcgaggacaggtgtttcacctgcggctggtgctgaaccagcccctacaatcctaccaccaactgaaactggaattcagcacagggccgaatcctagcatcgccaaacacaccctggtggtgctcgacccgaggacgccctcagaccactacaactggcaggcaacccttcaaaatgagtctggcaaagaggtcacagtggctgtcaccagttcccccaatgccatcctgggcaagtaccaactaaacgtgaaaactggaaaccacatccttaagtctgaagaaaacatcctataccttctcttcaacccatggtgtaaagaggacatggttttcatgcctgatgaggacgagcgcaaagagtacatcctcaatgacacgggctgccattacgtgggggctgccagaagtatcaaatgcaaaccctggaactttggtcagtttgagaaaaatgtcctggactgctgcatttccctgctgactgagagctccctcaagcccacagataggagggaccccgtgctggtgtgcagggccatgtgtgctatgatgagctttgagaaaggccagggcgtgctcattgggaattggactggggactatgaaggtggcacagccccatacaagtggacaggcagtgccccgatcctgcagcagtactacaacacgaagcaggctgtgtgctttggccagtgctgggtgtttgctgggatcctgactacagtgctgagagcgttgggcatcccagcacgcagtgtgacaggcttcgattcagctcacgacacagaaaggaacctcacggtggacacctatgtgaatgagaatggcaagaaaatcaccagtatgacccacgactctgtctggaatttccatgtgtggacggatgcctggatgaagcgaccggatctgcccaagggctacgacggctggcaggctgtggacgcaacgccgcaggagcgaagccagggtgtcttctgctgtgggccatcaccactgaccgccatccgcaaaggtgacatctttattgtctatgacaccagattcgtcttctcagaagtgaatggtgacaggctcatctggttggtgaagatggtgaatgggcaggaggagttacacgtaatttcaatggagaccacaagcatcgggaaaaacatcagcaccaaggcagtgggccaagacaggcggagagatatcacctatgagtacaagtatccagaaggctcctctgaggagaggcaggtcatggatcatgccttcctccttctcagttctgagagggagcacagacgacctgtaaaagagaactttcttcacatgtcggtacaatcagatgatgtgctgctgggaaactctgttaatttcaccgtgattcttaaaaggaagaccgctgccctacagaatgtcaacatcttgggctcctttgaactacagttgtacactggcaagaagatggcaaaactgtgtgacctcaataagacctcgcagatccaaggtcaagtatcagaagtgactctgaccttggactccaagacctacatcaacagcctggctatattagatgatgagccagttatcagaggtttcatcattgcggaaattgtggagtctaaggaaatcatggcctctgaagtattcacgtctttccagtaccctgagttctctatagagttgcctaacacaggcagaattggccagctacttgtctgcaattgtatcttcaagaataccctggccatccctttgactgacgtcaagttctctttggaaagcctgggcatctcctcactacagacctctgaccatgggacggtgcagcctggtgagaccatccaatcccaaataaaatgcaccccaataaaaactggacccaagaaatttatcgtcaagttaagttccaaacaagtgaaagagattaatgctcagaagattgttctcatcaccaagtagccttgtctgatgctgtggagccttagttgagatttcagcatttcctaccttgtgcttagctttcagattatggatgattaaatttgatgacttatatgagggcagattcaagagccagcaggtcaaaaaggccaacacaaccataagcagccagacccacaaggccaggtcctgtgctatcacagggtcacctcttttacagttagaaacaccagccgaggccacagaatcccatccctttcctgagtcatggcctcaaaaatcagggccaccattgtctcaattcaaatccatagatttcgaagccacagagtctctccctggagcagcagactatgggcagcccagtgctgccacctgctgacgacccttgagaagctgccatatcttcaggccatgggttcaccagccctgaaggcacctgtcaactggagtgctctctcagcactgggatgggcctgatagaagtgcattctcctcctattgcctccattctcctctctctatccctgaaatccaggaagtccctctcctggtgctccaagcagtttgaagcccaatctgcaaggacatttctcaagggccatgtggttttgcagacaaccctgtcctcaggcctgaactcaccatagagacccatgtcagcaaacggtgaccagcaaatcctcttcccttattctaaagctgccccttgggagactccagggagaaggcattgcttcctccctggtgtgaactctttctttggtattccatccactatcctggcaactcaaggctgcttctgttaactgaagcctgctccttcttgttctgccctccagagatttgctcaaatgatcaataagctttaaattaaactctacttcaagaaaaaaaaaccg

SEQ ID NO: 774 - DNA, 3064 bp, Homo sapiens
aattctaaaaatgcttttgcaagcttgcatgcctgcaggtgcagcggccgccagtgtgatggatatctgcagaattcggcttgcgctcagctggaattccgcagagatagagtcttccctggcattgcaggagagaatctgaagggatgatggatgcatcaaaagagctgcaagttctccacattgacttcttgaatcaggacaacgccgtttctcaccacacatgggagttccaaacgagcagtcctgtgttccggcgaggacaggtgtttcacctgcggctggtgctgaaccagcccctacaatcctaccaccaactgaaactggaattcagcacagggccgaatcctagcatcgccaaacacaccctggtggtgctcgacccgaggacgccctcagaccactacaactggcaggcaacccttcaaaatgagtctggcaaagaggtcacagtggctgtcaccagttcccccaatgccatcctgggcaagtaccaactaaacgtgaaaactggaaaccacatccttaagtctgaagaaaacatcctataccttctcttcaacccatggtgtaaagaggacatggttttcatgcctgatgaggacgagcgcaaagagtacatcctcaatgacacgggctgccattacgtgggggctgccagaagtatcaaatgcaaaccctggaactttggtcagtttgagaaaaatgtcctggactgctgcatttccctgctgactgagagctccctcaagcccacagataggagggaccccgtgctggtgtgcagggccatgtgtgctatgatgagctttgagaaaggccagggcgtgctcattgggaattggactggggactacgaaggtggcacagccccatacaagtggacaggcagtgccccgatcctgcagcagtactacaacacgaagcaggctgtgtgctttggccagtgctgggtgtttgctgggatcctgactacagtgctgagagcgttgggcatcccagcacgcagtgtgacaggcttcgattcagctcacgacacagaaaggaacctcacggtggacacctatgtgaatgagaatggcgagaaaatcaccagtatgacccacgactctgtctggaatttccatgtgtggacggatgcctggatgaagcgaccctacgacggctggcaggctgtggacgcaacgccgcaggagcgaagccagggtgtcttctgctgtgggccatcaccactgaccgccatccgcaaaggtgacatctttattgtctatgacaccagattcgtcttctcagaagtgaatggtgacaggctcatctggttggtgaagatggtgaatgggcaggaggagttacacgtaatttcaatggagaccacaagcatcgggaaaaacatcagcaccaaggcagtgggccaagacaggcggagagatatcacctatgagtacaagtatccagaaggctcctctgaggagaggcaggtcatggatcatgccttcctccttctcagttctgagagggagcacagacagcctgtaaaagagaactttcttcacatgtcggtacaatcagatgatgtgctgctgggaaactctgttaatttcaccgtgattcttaaaaggaagaccgctgccctacagaatgtcaacatcttgggctcctttgaactacagttgtacactggcaagaagatggcaaaactgtgtgacctcaataagacctcgcagatccaaggtcaagtatcagaagtgactctgaccttggactccaagacctacatcaacagcctggctatattagatgatgagccagttatcagaggtttcatcattgcggaaattgtggagtctaaggaaatcatggcctctgaagtattcacgtcaaaccagtaccctgagttctctatagagttgcctaacacaggcagaattggccagctacttgtctgcaattgtatcttcaagaataccctggccatccctttgactgacgtcaagttctctttggaaagcctgggcatctcctcactacagacctctgaccatgggacggtgcagcctggtgagaccatccaatcccaaataaaatgcaccccaataaaaactggacccaagaaatttatcgtcaagttaagttccaaacaagtgaaagagattaatgctcagaagattgttctcatcaccaagtagccttgtctgatgctgtggagccttagttgagatttcagcatttcctaccttgtgcttagctttcagattatggatgattaaatttgatgacttatatgagggcagattcaagagccagcaggtcaaaaaggccaacacaaccataagcagccagacccacaaggccaggtcctgtgctatcacagggtcacctcttttacagttagaaacaccagccgaggccacagaatcccatccctttcctgagtcatggcctcaaaaatcagggccaccattgtctcaattcaaatccatagatttcgaagccacagagctcttccctggagcagcagactatgggcagcccagtgctgccacctgctgacgacccttgagaagctgccatatcttcaggccatgggttcaccagccctgaaggcacctgtcaactggagtgctctctcagcactgggatgggcctgatagaagtgcattctcctcctattgcctccattctcctctctctatccctgaaatccaggaagtccctctcctggtgctccaagcagtttgaagcccaatctgcaaggacatttctcaagggccatgtggttttgcagacaaccctgtcctcaggcctgaactcaccatagagacccatgtcagcaaacggtgaccagcaaatcctcttcccttattctaaagctgccccttgggagactccagggagaaggcattgcttcctccctggtgtgaactctttctttggtattccatccactatcctggcaactcaaggctgcttctgttaactgaagcctgctccttcttgttctgccctccagagatttgctcaaatgatcaataagctttaaattaaaccggaatccgcggaattc

SEQ ID NO: 775 - protein, 684 aa, Homo sapiens
MMDASKELQVLHIDFLNQDNAVSHHTWEFQTSSPVFRRGQVFHLRLVLNQPLQSYHQLKLEFSTGPNPSIAKHTLVVLDPRTPSDHYNWQATLQNESGKEVTVAVTSSPNAILGKYQLNVKTGNHILKSEENILYLLFNPWCKEDMVFMPDEDERKEYILNDTGCHYVGAARSIKCKPWNFGQFEKNVLDCCISLLTESSLKPTDRRDPVLVCRAMCAMMSFEKGQGVLIGNWTGDYEGGTAPYKWTGSAPILQQYYNTKQAVCFGQCWVFAGILTTVLRALGIPARSVTGFDSAHDTERNLTVDTYVNENGKKITSMTHDSVWNFHVWTDAWMKRPDLPKGYDGWQAVDATPQERSQGVFCCGPSPLTAIRKGDIFIVYDTRFVFSEVNGDRLIWLVKMVNGQEELHVISMETTSIGKNISTKAVGQDRRRDITYEYKYPEGSSEERQVMDHAFLLLSSEREHRRPVKENFLHMSVQSDDVLLGNSVNFTVILKRKTAALQNVNILGSFELQLYTGKKMAKLCDLNKTSQIQGQVSEVTLTLDSKTYINSLAILDDEPVIRGFIIAEIVESKEIMASEVFTSFQYPEFSIELPNTGRIGQLLVCNCIFKNTLAIPLTDVKFSLESLGISSLQTSDHGTVQPGETIQSQIKCTPIKTGPKKFIVKLSSKQVKEINAQKIVLITK

SEQ ID NO: 776 - protein, 679 aa, Homo sapiens
MMDASKELQVLHIDFLNQDNAVSHHTWEFQTSSPVFRRGQVFHLRLVLNQPLQSYHQLKLEFSTGPNPSIAKHTLVVLDPRTPSDHYNWQATLQNESGKEVTVAVTSSPNAILGKYQLNVKTGNHILKSEENILYLLFNPWCKEDMVFMPDEDERKEYILNDTGCHYVGAARSIKCKPWNFGQFEKNVLDCCISLLTESSLKPTDRRDPVLVCRAMCAMMSFEKGQGVLIGNWTGDYEGGTAPYKWTGSAPILQQYYNTKQAVCFGQCWVFAGILTTVLRALGIPARSVTGFDSAHDTERNLTVDTYVNENGEKITSMTHDSVWNFHVWTDAWMKRPYDGWQAVDATPQERSQGVFCCGPSPLTAIRKGDIFIVYDTRFVFSEVNGDRLIWLVKMVNGQEELHVISMETTSIGKNISTKAVGQDRRRDITYEYKYPEGSSEERQVMDHAFLLLSSEREHRQPVKENFLHMSVQSDDVLLGNSVNFTVILKRKTAALQNVNILGSFELQLYTGKKMAKLCDLNKTSQIQGQVSEVTLTLDSKTYINSLAILDDEPVIRGFIIAEIVESKEIMASEVFTSNQYPEFSIELPNTGRIGQLLVCNCIFKNTLAIPLTDVKFSLESLGISSLQTSDHGTVQPGETIQSQIKCTPIKTGPKKFIVKLSSKQVKEINAQKIVLITK

SEQ ID NO: 777 - DNA, 5668 bp, Homo sapiens
gtcacttaggaaaaggtgtcctttcgggcagccgggctcagcatgaggaacagaaggaatgacactctggacagcacccggaccctgtactccagcgcgtctcggagcacagacttgtcttacagtgaaagcgacttggtgaattttattcaagcaaattttaagaaacgagaatgtgtcttctttaccaaagattccaaggccacggagaatgtgtgcaagtgtggctatgcccagagccagcacatggaaggcacccagatcaaccaaagtgagaaatggaactacaagaaacacaccaaggaatttcctaccgacgcctttggggatattcagtttgagacactggggaagaaagggaagtatatacgtctgtcctgcgacacggacgcggaaatcctttacgagctgctgacccagcactggcacctgaaaacacccaacctggtcatttctgtgaccgggggcgccaagaacttcgccctgaagccgcgcatgcgcaagatcttcagccggctcatctacatcgcgcagtccaaaggtgcttggattctcacgggaggcacccattatggcctgacgaagtacatcggggaggtggtgagagataacaccatcagcaggagttcagaggagaatattgtggccattggcatagcagcttggggcatggtctccaaccgggacaccctcatcaggaattgcgatgctgagggctattttttagcccagtaccttatggatgacttcacaagggatccactgtatatcctggacaacaaccacacacatttgctgctcgtggacaatggctgtcatggacatcccactgtcgaagcaaagctccggaatcagctagagaagcatatctctgagcgcactattcaagattccaactatggtggcaagatccccattgtgtgttttgcccaaggaggtggaaaagagactttgaaagccatcaatacctccatcaaaaataaaattccttgtgtggtggtggaaggctcgggccggatcgctgatgtgatcgctagcctggtggaggtggaggatgccccgacatcttctgccgtcaaggagaagctggtgcgctttttaccccgcacggtgtcccggctgtctgaggaggagactgagagttggatcaaatggctcaaagaaattctcgaatgttctcacctattaacagttattaaaatggaagaagctggggatgaaattgtgagcaatgccatctcctacgctctatacaaagccttcagcaccagtgagcaagacaaggataactggaatgggcagctgaagcttctgctggagtggaaccagctggacttagccaatgatgagattttcaccaatgaccgccgatgggagtctgctgaccttcaagaagtcatgtttacggctctcataaaggacagacccaagtttgtccgcctctttctggagaatggcttgaacctacggaagtttctcacccatgatgtcctcactgaactcttctccaaccacttcagcacgcttgtgtaccggaatctgcagatcgccaagaattcctataatgatgccctcctcacgtttgtctggaaactggttgcgaacttccgaagaggcttccggaaggaagacagaaatggccgggacgagatggacatagaactccacgacgtgtctcctattactcggcaccccctgcaagctctcttcatctgggccattcttcagaataagaaggaactctccaaagtcatttgggagcagaccaggggctgcactctggcagccctgggagccagcaagcttctgaagactctggccaaagtgaagaacgacatcaatgctgctggggagtccgaggagctggctaatgagtacgagacccgggctgttgagctgttcactgagtgttacagcagcgatgaagacttggcagaacagctgctggtctattcctgtgaagcttggggtggaagcaactgtctggagctggcggtggaggccacagaccagcatttcaccgcccagcctggggtccagaattttctttctaagcaatggtatggagagatttcccgagacaccaagaactggaagattatcctgtgtctgtttattatacccttggtgggctgtggctttgtatcatttaggaagaaacctgtcgacaagcacaagaagctgctttggtactatgtggcgttcttcacctcccccttcgtggtcttctcctggaatgtggtcttctacatcgccttcctcctgctgtttgcctacgtgctgctcatggatttccattcggtgccacacccccccgagctggtcctgtactcgctggtctttgtcctcttctgtgatgaagtgagacagtggtacgtaaatggggtgaattattttactgacctgtggaatgtgatggacacgctggggcttttttacttcatagcaggaattgtatttcggctccactcttctaataaaagctctttgtattctggacgagtcattttctgtctggactacattattttcactctaagattgatccacatttttactgtaagcagaaacttaggacccaagattataatgctgcagaggatgctgatcgatgtgttcttcttcctgttcctctttgcggtgtggatggtggcctttggcgtggccaggcaagggatccttaggcagaatgagcagcgctggaggtggatattccgttcggtcatctacgagccctacctggccatgttcggccaggtgcccagtgacgtggatggtaccacgtatgactttgcccactgcaccttcactgggaatgagtccaagccactgtgtgtggagctggatgagcacaacctgccccggttccccgagtggatcaccatccccctggtgtgcatctacatgttatccaccaacatcctgctggtcaacctgctggtcgccatgtttggctacacggtgggcaccgtccaggagaacaatgaccaggtctggaagttccagaggtacttcctggtgcaggagtactgcagccgcctcaatatccccttccccttcatcgtcttcgcttacttctacatggtggtgaagaagtgcttcaagtgttgctgcaaggagaaaaacatggagtcttctgtctgctgtttcaaaaatgaagacaatgagactctggcatgggagggtgtcatgaaggaaaactaccttgtcaagatcaacacaaaagccaacgacacctcagaggaaatgaggcatcgatttagacaactggatacaaagcttaatgatctcaagggtcttctgaaagagattgctaataaaatcaaataaaactgtatgaaactctaatggagaaaaatctaattatagcaagatcatattaaggaatgctgatgaacaattttgctatcgactactaaatgagagattttcagacccctgggtacatggtggatgattttaaatcaccctagtgtgctgagaccttgagaataaagtgtgtgattggtttcatacttgaagacggatataaaggaagaatatttcctttatgtgtttctccagaatggtgcctgtttctctctgtgtctcaatgcctgggactggaggttgatagtttaagtgtgttcttaccgcctcctttttcctttaatcttatttttgatgaacacatatataggagaacatctatcctatgaataagaacctggtcatgctttactcctgtattgttattttgttcatttccaattgattctctacttttcccttttttgtattatgtgactaattagttggcatattgttaaaagtctctcaaattaggccagattctaaaacatgctgcagcaagaggaccccgctctcttcaggaaaagtgttttcatttctcaggatgcttcttacctgtcagaggaggtgacaaggcagtctcttgctctcttggactcaccaggctcctattgaaggaaccacccccattcctaaatatgtgaaaagtcgcccaaaatgcaaccttgaaaggcactactgactttgttcttattggatactcctcttatttattatttttccattaaaaataatagctggctattatagaaaatttagaccatacagagatgtagaaagaacataaattgtccccattaccttaaggtaatcactgctaacaatttctggatggtttttcaagtctattttttttctatgtatgtctcaattctctttcaaaattttacagaatgttatcatactacatatatactttttatgtaagctttttcacttagtattttatcaaatatgtttttattatattcatagccttcttaaacattatatcaataattgcataataggcaacctctagcgattaccataattttgctcattgaaggctatctccagttgatcattgggatgagcatctttgtgcatgaatcctattgctgtatttgggaaaattttccaaggttagattccaataaatatctatttattattaaatattaaaatatcgatttattattaaaaccatttataaggctttttcataaatgtatagcaaataggaattattaacttgagcataagatatgagatacatgaacctgaactattaaaataaaatattatatttaaccctagtttaagaagaagtcaatatgcttatttaaatattatggatggtgggcagatcacttgaggtcaggagttcgagaccagcctggccaacatggcaaaaccacatctctactaaaaataaaaaaattagctgggtgtggtggtgcactcctgtaatcccagctactcagaaggctgaggtacaagaattgctggaacctgggaggcggaggttgcagtgaaccaagattgcaccactgcactccagccggggtgacagagtgagactccgactgaaaataaataaataaataaataaataaataaataaataaatattatggatggtgaagggaatggtatagaattggagagattatcttactgaacacctgtagtcccagctttctctggaagtggtggtatttgagcaggatgtgcacaaggcaattgaaatgcccataattagtttctcagctttgaatacactataaactcagtggctgaaggaggaaattttagaaggaagctactaaaagatctaatttgaaaaactacaaaagcattaactaaaaaagtttattttccttttgtctgggcagtagtgaaaataactactcacaacattcactatgtttgcaaggaattaacacaaataaaagatgcctttttacttaaacgccaagacagaaaacttgcccaatactgagaagcaacttgcattagagagggaactgttaaatgttttcaacccagttcatctggtggatgtttttgcaggttactctgagaattttgcttatgaaaaatcattatttttagtgtagttcacaataatgtattgaacatacttctaatcaaaggtgctatgtccttgtgtatggtactaaatgtgtcctgtgtacttttgcacaactgagaatcctgcggcttggtttaatgagtgtgttcatgaaataaataatggaggaattgtcaaaaaaaaaaaaaaaaaaaaaaaaaaaaaaaaaaaaaaaaaaaaaaaaaaaaaaaaaaaaaaaaa

SEQ ID NO: 778 - protein, 1095 aa, Homo sapiens
MRNRRNDTLDSTRTLYSSASRSTDLSYSESDLVNFIQANFKKRECVFFTKDSKATENVCKCGYAQSQHMEGTQINQSEKWNYKKHTKEFPTDAFGDIQFETLGKKGKYIRLSCDTDAEILYELLTQHWHLKTPNLVISVTGGAKNFALKPRMRKIFSRLIYIAQSKGAWILTGGTHYGLTKYIGEVVRDNTISRSSEENIVAIGIAAWGMVSNRDTLIRNCDAEGYFLAQYLMDDFTRDPLYILDNNHTHLLLVDNGCHGHPTVEAKLRNQLEKHISERTIQDSNYGGKIPIVCFAQGGGKETLKAINTSIKNKIPCVVVEGSGRIADVIASLVEVEDAPTSSAVKEKLVRFLPRTVSRLSEEETESWIKWLKEILECSHLLTVIKMEEAGDEIVSNAISYALYKAFSTSEQDKDNWNGQLKLLLEWNQLDLANDEIFTNDRRWESADLQEVMFTALIKDRPKFVRLFLENGLNLRKFLTHDVLTELFSNHFSTLVYRNLQIAKNSYNDALLTFVWKLVANFRRGFRKEDRNGRDEMDIELHDVSPITRHPLQALFIWAILQNKKELSKVIWEQTRGCTLAALGASKLLKTLAKVKNDINAAGESEELANEYETRAVELFTECYSSDEDLAEQLLVYSCEAWGGSNCLELAVEATDQHFTAQPGVQNFLSKQWYGEISRDTKNWKIILCLFIIPLVGCGFVSFRKKPVDKHKKLLWYYVAFFTSPFVVFSWNVVFYIAFLLLFAYVLLMDFHSVPHPPELVLYSLVFVLFCDEVRQWYVNGVNYFTDLWNVMDTLGLFYFIAGIVFRLHSSNKSSLYSGRVIFCLDYIIFTLRLIHIFTVSRNLGPKIIMLQRMLIDVFFFLFLFAVWMVAFGVARQGILRQNEQRWRWIFRSVIYEPYLAMFGQVPSDVDGTTYDFAHCTFTGNESKPLCVELDEHNLPRFPEWITIPLVCIYMLSTNILLVNLLVAMFGYTVGTVQENNDQVWKFQRYFLVQEYCSRLNIPFPFIVFAYFYMVVKKCFKCCCKEKNMESSVCCFKNEDNETLAWEGVMKENYLVKINTKANDTSEEMRHRFRQLDTKLNDLKGLLKEIANKIK

SEQ ID NO: 779 - DNA, 3639 bp, Homo sapiens
gattacgcaagctatttaggtgacactatagaatwctcagcttgcatcaagcttggtaccgagctcggatccctagtaacggccgccagtgtgctggaattcgcccttgcagccgggctcagcatgaggaacagaaggaatgacactctggacagcacccggaccctgtactccagcgcgtctcggagcacagacttgtcttacagtgaaagcgacttggtgaattttattcaagcaaattttaagaaacgagaatgtgtcttctttaccaaagattccaaggccacggagaatgtgtgcaagtgtggctatgcccagagccagcacatggaaggcacccagatcaaccaaagtgagaaatggaactacaagaaacacaccaaggaatttcctaccgacgcctttggggatattcagtttgagacactggggaagaaagggaagtatatacgtctgtcctgcgacacggacgcggaaatcctttacgagctgctgacccagcactggcacctgaaaacacccaacctggtcatttctgtgaccgggggcgccaagaacttcgccctgaagccgcgcatgcgcaagatcttcagccggctcatctacatcgcgcagtccaaaggtgcttggattctcacgggaggcacccattatggcctgatgaagtacatcggggaggtggtgagagataacaccatcagcaggagttcagaggagaatattgtggccattggcatagcagcttggggcatggtctccaaccgggacaccctcatcaggaattgcgatgctgagggctattttttagcccagtaccttatggatgacttcacaagagatccactgtatatcctggacaacaaccacacacatttgctgctcgtggacaatggctgtcatggacatcccactgtcgaagcaaagctccggaatcagctagagaagtatatctctgagcgcactattcaagattccaactatggtggcaagatccccattgtgtgttttgcccaaggaggtggaaaagagactttgaaagccatcaatacctccatcaaaaataaaattccttgtgtggtggtggaaggctcgggccagatcgctgatgtgatcgctagcctggtggaggtggaggatgccctgacatcttctgccgtcaaggagaagctggtgcgctttttaccccgcacggtgtcccggctgcctgaggaggagactgagagttggatcaaatggctcaaagaaattctcgaatgttctcacctattaacagttattaaaatggaagaagctggggatgaaattgtgagcaatgccatctcctacgctctatacaaagccttcagcaccagtgagcaagacaaggataactggaatgggcagctgaagcttctgctggagtggaaccagctggacttagccaatgatgagattttcaccaatgaccgccgatgggagtctgctgaccttcaagaagtcatgtttacggctctcataaaggacagacccaagtttgtccgcctctttctggagaatggcttgaacctacggaagtttctcacccatgatgtcctcactgaactcttctccaaccacttcagcacgcttgtgtaccggaatctgcagatcgccaagaattcctataatgatgccctcctcacgtttgtctggaaactggttgcgaacttccgaagaggcttccggaaggaagacagaaatggccgggacgagatggacatagaactccacgacgtgtctcctattactcggcaccccctgcaagctctcttcatctgggccattcttcagaataagaaggaactctccaaagtcatttgggagcagaccaggggctgcactctggcagccctgggagccagcaagcttctgaagactctggccaaagtgaagaacgacatcaatgctgctggggagtccgaggagctggctaatgagtacgagacccgggctgttgagctgttcactgagtgttacagcagcgatgaagacttggcagaacagctgctggtctattcctgtgaagcttggggtggaagcaactgtctggagctggcggtggaggccacagaccagcatttcatcgcccagcctggggtccagaattttctttctaagcaatggtatggagagatttcccgagacaccaagaactggaagattatcctgtgtctgtttattatacccttggtgggctgtggctttgtatcatttaggaagaaacctgtcgacaagcacaagaagctgctttggtactatgtggcgttcttcacctcccccttcgtggtcttctcctggaatgtggtcttctacatcgccttcctcctgctgtttgcctacgtgctgctcatggatttccattcggtgccacacccccccgagctggtcctgtactcgctggtctttgtcctcttctgtgatgaagtgagacagtggtacgtaaatggggtgaattattttactgacctgtggaatgtgatggacacgctggggcttttttacttcatagcaggaattgtatttcggctccactcttctaataaaagctctttgtattctggacgagtcattttctgtctggactacattattttcactctaagattgatccacatttttactgtaagcagaaacttaggacccaagattataatgctgcagaggatgctgatcgatgtgttcttcttcctgttcctctttgcggwgtggatggtggcctttggcgtggccaggcaagggatccttaggcagaatgagcagcgctggaggtggatattccgttcggtcatctacgagccctacctggccatgttcggccaggtgcccagtgacgtggatggtaccacgtatgactttgcccactgcaccttcactgggaatgagtccaagccactgtgtgtggagctggatgagcacaacctgccccggttccccgagtggatcaccatccccctggtgtgcatctacatgttatccaccaacatcctgctggtcaacctgctggtcgccatgtttggctacacggtgggcaccgtccaggagaacaatgaccaggtctggaagttccagaggtacttcctggtgcaggagtactgcagccgcctcaatatccccttccccttcatcgtcttcgcttacttctacatggtggtgaagaagtgcttcaagtgttgctgcaaggagaaaaacatggagtcttctgtctgctgtttcaaaaatgaagacaatgagactctggcatgggagggtgtcatgaaggaaaactaccttgtcaagatcaacacaaaagccaacgacacctcagaggaaatgaggcatcgatttagacaactggatacaaagcttaatgatctcaagggtcttctgaaagagattgctaataaaatcaaataaaactgtatgaactctaatggagaaaaatctaattatagcaagatcatattaaggaatgctgatgaacaattttgctatcgactactaaatgagagattttcagacccctgggtacatggtggatgattttaaatcaccctagtgtgctgagaccttgagaataaagtgtgaagggcgaattctgcagatatccatcacactggcggccgctcgagcatgcatctagag

SEQ ID NO: 780 - protein, 1095 aa, Homo sapiens
  VARIANT (1)...(1095): Xaa = Any Amino Acid
MRNRRNDTLDSTRTLYSSASRSTDLSYSESDLVNFIQANFKKRECVFFTKDSKATENVCKCGYAQSQHMEGTQINQSEKWNYKKHTKEFPTDAFGDIQFETLGKKGKYIRLSCDTDAEILYELLTQHWHLKTPNLVISVTGGAKNFALKPRMRKIFSRLIYIAQSKGAWILTGGTHYGLMKYIGEVVRDNTISRSSEENIVAIGIAAWGMVSNRDTLIRNCDAEGYFLAQYLMDDFTRDPLYILDNNHTHLLLVDNGCHGHPTVEAKLRNQLEKYISERTIQDSNYGGKIPIVCFAQGGGKETLKAINTSIKNKIPCVVVEGSGQIADVIASLVEVEDALTSSAVKEKLVRFLPRTVSRLPEEETESWIKWLKEILECSHLLTVIKMEEAGDEIVSNAISYALYKAFSTSEQDKDNWNGQLKLLLEWNQLDLANDEIFTNDRRWESADLQEVMFTALIKDRPKFVRLFLENGLNLRKFLTHDVLTELFSNHFSTLVYRNLQIAKNSYNDALLTFVWKLVANFRRGFRKEDRNGRDEMDIELHDVSPITRHPLQALFIWAILQNKKELSKVIWEQTRGCTLAALGASKLLKTLAKVKNDINAAGESEELANEYETRAVELFTECYSSDEDLAEQLLVYSCEAWGGSNCLELAVEATDQHFIAQPGVQNFLSKQWYGEISRDTKNWKIILCLFIIPLVGCGFVSFRKKPVDKHKKLLWYYVAFFTSPFVVFSWNVVFYIAFLLLFAYVLLMDFHSVPHPPELVLYSLVFVLFCDEVRQWYVNGVNYFTDLWNVMDTLGLFYFIAGIVFRLHSSNKSSLYSGRVIFCLDYIIFTLRLIHIFTVSRNLGPKIIMLQRMLIDVFFFLFLFAXWMVAFGVARQGILRQNEQRWRWIFRSVIYEPYLAMFGQVPSDVDGTTYDFAHCTFTGNESKPLCVELDEHNLPRFPEWITIPLVCIYMLSTNILLVNLLVAMFGYTVGTVQENNDQVWKFQRYFLVQEYCSRLNIPFPFIVFAYFYMVVKKCFKCCCKEKNMESSVCCFKNEDNETLAWEGVMKENYLVKINTKANDTSEEMRHRFRQLDTKLNDLKGLLKEIANKIK

SEQ ID NO: 781 - protein, 15 aa, Homo sapiens
RMPTVLQCVNVSVVS

SEQ ID NO: 782 - DNA, 45 bp, Homo sapiens
agaatgcctaccgtgctgcagtgcgtgaacgtgtcggtggtgtct

SEQ ID NO: 783 - DNA, 45 bp, Homo sapiens
gagccagggagccagatggtggaggccagcctctccgtacggcac

SEQ ID NO: 784 - DNA, 45 bp, Homo sapiens
gaggccgaccaagagccagggagccagatggtggaggccagcctc

SEQ ID NO: 785 - DNA, 45 bp, Homo sapiens
ggcctgcacagtcttgaggccgaccaagagccagggagccagatg

SEQ ID NO: 786 - DNA, 45 bp, Homo sapiens
tacaccatcgggctgggcctgcacagtcttgaggccgaccaagag

SEQ ID NO: 787 - DNA, 42 bp, Homo sapiens
ttccagaactcctacaccatcgggctgggcctgcacagtctt

SEQ ID NO: 788 - DNA, 45 bp, Homo sapiens
ctgtcagccgcacactgtttccagaactcctacaccatcgggctg

SEQ ID NO: 789 - DNA, 45 bp, Homo sapiens
catccgcagtgggtgctgtcagccgcacactgtttccagaactcc

SEQ ID NO: 790 - DNA, 45 bp, Homo sapiens
tcgggcgtcctggtgcatccgcagtgggtgctgtcagccgcacac

SEQ ID NO: 791 - DNA, 45 bp, Homo sapiens
aacgaattgttctgctcgggcgtcctggtgcatccgcagtgggtg

SEQ ID NO: 792 - DNA, 45 bp, Homo sapiens
gcactggtcatggaaaacgaattgttctgctcgggcgtcctggtg

SEQ ID NO: 793 - DNA, 51 bp, Homo sapiens
tcgcagccctggcaggcggcactggtcatggaaaacgaattgttctgctcg

SEQ ID NO: 794 - DNA, 45 bp, Homo sapiens
atcagcattgcttcgcagtgccctaccgcggggaactcttgcctc

SEQ ID NO: 795 - DNA, 45 bp, Homo sapiens
tccgtgtccgagtctgacaccatccggagcatcagcattgcttcg

SEQ ID NO: 796 - DNA, 45 bp, Homo sapiens
atcaagttggacgaatccgtgtccgagtctgacaccatccggagc

SEQ ID NO: 797 - DNA, 45 bp, Homo sapiens
aacgacctcatgctcatcaagttggacgaatccgtgtccgagtct

SEQ ID NO: 798 - DNA, 45 bp, Homo sapiens
agacccttgctcgctaacgacctcatgctcatcaagttggacgaa

SEQ ID NO: 799 - protein, 15 aa, Homo sapiens
EPGSQMVEASLSVRH

SEQ ID NO: 800 - protein, 15 aa, Homo sapiens
EADQEPGSQMVEASL

SEQ ID NO: 801 - protein, 15 aa, Homo sapiens
GLHSLEADQEPGSQM

SEQ ID NO: 802 - protein, 15 aa, Homo sapiens
YTIGLGLHSLEADQE

SEQ ID NO: 803 - protein, 14 aa, Homo sapiens
FQNSYTIGLGLHSL

SEQ ID NO: 804 - protein, 15 aa, Homo sapiens
LSAAHCFQNSYTIGL

SEQ ID NO: 805 - protein, 15 aa, Homo sapiens
HPQWVLSAAHCFQNS

SEQ ID NO: 806 - protein, 15 aa, Homo sapiens
SGVLVHPQWVLSAAH

SEQ ID NO: 807 - protein, 15 aa, Homo sapiens
NELFCSGVLVHPQWV

SEQ ID NO: 808 - protein, 15 aa, Homo sapiens
ALVMENELFCSGVLV

SEQ ID NO: 809 - protein, 17 aa, Homo sapiens
SQPWQAALVMENELFCS

SEQ ID NO: 810 - protein, 15 aa, Homo sapiens
ISIASQCPTAGNSCL

SEQ ID NO: 811 - protein, 15 aa, Homo sapiens
SVSESDTIRSISIAS

SEQ ID NO: 812 - protein, 15 aa, Homo sapiens
IKLDESVSESDTIRS

SEQ ID NO: 813 - protein, 15 aa, Homo sapiens
NDLMLIKLDESVSES

SEQ ID NO: 814 - protein, 15 aa, Homo sapiens
RPLLANDLMLIKLDE

SEQ ID NO: 815 - DNA, 35 bp, Artificial Sequence
  PCR primer
ggaccagcatatgaggaacagaaggaatgacactc

SEQ ID NO: 816 - DNA, 29 bp, Artificial Sequence
  PCR primer
ccgctcgagtccaccccaagcttcacagg

SEQ ID NO: 817 - DNA, 1959 bp, Homo sapiens
atgaggaacagaaggaatgacactctggacagcacccggaccctgtactccagcgcgtctcggagcacagacttgtcttacagtgaaagcgacttggtgaattttattcaagcaaattttaagaaacgagaatgtgtcttctttaccaaagattccaaggccacggagaatgtgtgcaagtgtggctatgcccagagccagcacatggaaggcacccagatcaaccaaagtgagaaatggaactacaagaaacacaccaaggaatttcctaccgacgcctttggggatattcagtttgagacactggggaagaaagggaagtatatacgtctgtcctgcgacacggacgcggaaatcctttacgagctgctgacccagcactggcacctgaaaacacccaacctggtcatttctgtgaccgggggcgccaagaacttcgccctgaagccgcgcatgcgcaagatcttcagccggctcatctacatcgcgcagtccaaaggtgcttggattctcacgggaggcacccattatggcctgatgaagtacatcggggaggtggtgagagataacaccatcagcaggagttcagaggagaatattgtggccattggcatagcagcttggggcatggtctccaaccgggacaccctcatcaggaattgcgatgctgagggctattttttagcccagtaccttatggatgacttcacaagagatccactgtatatcctggacaacaaccacacacatttgctgctcgtggacaatggctgtcatggacatcccactgtcgaagcaaagctccggaatcagctagagaagtatatctctgagcgcactattcaagattccaactatggtggcaagatccccattgtgtgttttgcccaaggaggtggaaaagagactttgaaagccatcaatacctccatcaaaaataaaattccttgtgtggtggtggaaggctcgggccagatcgctgatgtgatcgctagcctggtggaggtggaggatgccctgacatcttctgccgtcaaggagaagctggtgcgctttttaccccgcacggtgtcccggctgcctgaggaggagactgagagttggatcaaatggctcaaagaaattctcgaatgttctcacctattaacagttattaaaatggaagaagctggggatgaaattgtgagcaatgccatctcctacgctctatacaaagccttcagcaccagtgagcaagacaaggataactggaatgggcagctgaagcttctgctggagtggaaccagctggacttagccaatgatgagattttcaccaatgaccgccgatgggagtctgctgaccttcaagaagtcatgtttacggctctcataaaggacagacccaagtttgtccgcctctttctggagaatggcttgaacctacggaagtttctcacccatgatgtcctcactgaactcttctccaaccacttcagcacgcttgtgtaccggaatctgcagatcgccaagaattcctataatgatgccctcctcacgtttgtctggaaactggttgcgaacttccgaagaggcttccggaaggaagacagaaatggccgggacgagatggacatagaactccacgacgtgtctcctattactcggcaccccctgcaagctctcttcatctgggccattcttcagaataagaaggaactctccaaagtcatttgggagcagaccaggggctgcactctggcagccctgggagccagcaagcttctgaagactctggccaaagtgaagaacgacatcaatgctgctggggagtccgaggagctggctaatgagtacgagacccgggctgttgagctgttcactgagtgttacagcagcgatgaagacttggcagaacagctgctggtctattcctgtgaagcttggggtggactcgagcaccaccaccaccaccactga

SEQ ID NO: 818 - protein, 652 aa, Homo sapiens
MRNRRNDTLDSTRTLYSSASRSTDLSYSESDLVNFIQANFKKRECVFFTKDSKATENVCKCGYAQSQHMEGTQINQSEKWNYKKHTKEFPTDAFGDIQFETLGKKGKYIRLSCDTDAEILYELLTQHWHLKTPNLVISVTGGAKNFALKPRMRKIFSRLIYIAQSKGAWILTGGTHYGLMKYIGEVVRDNTISRSSEENIVAIGIAAWGMVSNRDTLIRNCDAEGYFLAQYLMDDFTRDPLYILDNNHTHLLLVDNGCHGHPTVEAKLRNQLEKYISERTIQDSNYGGKIPIVCFAQGGGKETLKAINTSIKNKIPCVVVEGSGQIADVIASLVEVEDALTSSAVKEKLVRFLPRTVSRLPEEETESWIKWLKEILECSHLLTVIKMEEAGDEIVSNAISYALYKAFSTSEQDKDNWNGQLKLLLEWNQLDLANDEIFTNDRRWESADLQEVMFTALIKDRPKFVRLFLENGLNLRKFLTHDVLTELFSNHFSTLVYRNLQIAKNSYNDALLTFVWKLVANFRRGFRKEDRNGRDEMDIELHDVSPITRHPLQALFIWAILQNKKELSKVIWEQTRGCTLAALGASKLLKTLAKVKNDINAAGESEELANEYETRAVELFTECYSSDEDLAEQLLVYSCEAWGGLEHHHHHH

SEQ ID NO: 819 - protein, 132 aa, Homo sapien
TAASDNFQLSQGGQGFAIPIGQAMAIAGQIRSGGGSPTVHIGPTAFLGLGVVDNNGNGARVQRVVGSAPAASLGISTGDVITAVDGAPINSATAMADALNGHHPGDVISVNWQTKSGGTRTGNVTLAEGPPA

SEQ ID NO: 820 - DNA, 36 bp, Artificial Sequence
  PCR primer
ggggaattcatgatccgggagaaatttgcccactgc

SEQ ID NO: 821 - DNA, 33 bp, Artificial Sequence
  PCR primer
gggctcgagtcaggagtttgagaccagcctggc

SEQ ID NO: 822 - DNA, 675 bp, Homo sapiens
atgcatcaccatcaccatcacacggccgcgtccgataacttccagctgtcccagggtgggcagggattcgccattccgatcgggcaggcgatggcgatcgcgggccagatcaagcttcccaccgttcatatcgggcctaccgccttcctcggcttgggtgttgtcgacaacaacggcaacggcgcacgagtccaacgcgtggtcgggagcgctccggcggcaagtctcggcatctccaccggcgacgtgatcaccgcggtcgacggcgctccgatcaactcggccaccgcgatggcggacgcgcttaacgggcatcatcccggtgacgtcatctcggtgacctggcaaaccaagtcgggcggcacgcgtacagggaacgtgacattggccgagggacccccggccgaattcatgatccgggagaaatttgcccactgcaccgtgctaaccattgcacacagattgaacaccattattgacagcgacaagataatggttttagattcaggaagactgaaagaatatgatgagccgtatgttttgctgcaaaataaagagagcctattttacaagatggtgcaacaactgggcaaggcagaagccgctgccctcactgaaacagcaaaacagagatggggtttcaccatgttggccaggctggtctcaaactcctga

SEQ ID NO: 823 - DNA, 291 bp, Homo sapiens
atggggatccgggagaaatttgcccactgcaccgtgctaaccattgcacacagattgaacaccattattgacagcgacaagataatggttttagattcaggaagactgaaagaatatgatgagccgtatgttttgctgcaaaataaagagagcctattttacaagatggtgcaacaactgggcaaggcagaagccgctgccctcactgaaacagcaaaacagagatggggtttcaccatgttggccaggctggtctcaaactccctcgagcaccaccaccaccaccactga

SEQ ID NO: 824 - DNA, 1074 bp, Homo sapiens
atgtcagccattgagagggtgtcagaggcaatcgtcagcatccgaagaatccagacctttttgctacttgatgagatatcacagcgcaaccgtcagctgccgtcagatggtaaaaagatggtgcatgtgcaggattttactgctttttgggataaggcatcagagaccccaactctacaaggcctttcctttactgtcagacctggcgaattgttagctgtggtcggccccgtgggagcagggaagtcatcactgttaagtgccgtgctcggggaattggccccaagtcacgggctggtcagcgtgcatggaagaattgcctatgtgtctcagcagccctgggtgttctcgggaactctgaggagtaatattttatttgggaagaaatacgaaaaggaacgatatgaaaaagtcataaaggcttgtgctctgaaaaaggatttacagctgttggaggatggtgatctgactgtgataggagatcggggaaccacgctgagtggagggcagaaagcacgggtaaaccttgcaagagcagtgtatcaagatgctgacatctatctcctggacgatcctctcagtgcagtagatgcggaagttagcagacacttgttcgaactgtgtatttgtcaaattttgcatgagaagatcacaattttagtgactcatcagttgcagtacctcaaagctgcaagtcagattctgatattgaaagatggtaaaatggtgcagaaggggacttacactgagttcctaaaatctggtatagattttggctcccttttaaagaaggataatgaggaaagtgaacaacctccagttccaggaactcccacactaaggaatcgtaccttctcagagtcttcggtttggtctcaacaatcttctagaccctccttgaaagatggtgctctggagagccaagatacagagaatgtcccagttacactatcagaggagaaccgttctgaaggaaaagttggttttcaggcctataagaattacttcagagctggtgctcactggattgtcttcattttccttattctcgagcaccaccaccaccaccactga

SEQ ID NO: 825 - protein, 224 aa, Homo sapiens
MHHHHHHTAASDNFQLSQGGQGFAIPIGQAMAIAGQIKLPTVHIGPTAFLGLGVVDNNGNGARVQRVVGSAPAASLGISTGDVITAVDGAPINSATAMADALNGHHPGDVISVTWQTKSGGTRTGNVTLAEGPPAEFMIREKFAHCTVLTIAHRLNTIIDSDKIMVLDSGRLKEYDEPYVLLQNKESLFYKMVQQLGKAEAAALTETAKQRWGFTMLARLVSNS

SEQ ID NO: 826 - protein, 357 aa, Homo sapiens
MSAIERVSEAIVSIRRIQTFLLLDEISQRNRQLPSDGKKMVHVQDFTAFWDKASETPTLQGLSFTVRPGELLAVVGPVGAGKSSLLSAVLGELAPSHGLVSVHGRIAYVSQQPWVFSGTLRSNILFGKKYEKERYEKVIKACALKKDLQLLEDGDLTVIGDRGTTLSGGQKARVNLARAVYQDADIYLLDDPLSAVDAEVSRHLFELCICQILHEKITILVTHQLQYLKAASQILILKDGKMVQKGTYTEFLKSGIDFGSLLKKDNEESEQPPVPGTPTLRNRTFSESSVWSQQSSRPSLKDGALESQDTENVPVTLSEENRSEGKVGFQAYKNYFRAGAHWIVFIFLILEHHHHHH

SEQ ID NO: 827 - protein, 96 aa, Homo sapiens
MGIREKFAHCTVLTIAHRLNTIIDSDKIMVLDSGRLKEYDEPYVLLQNKESLFYKMVQQLGKAEAAALTETAKQRWGFTMLARLVSNSLEHHHHHH

SEQ ID NO: 828 - DNA, 35 bp, Artificial Sequence
  PCR primer
cgcccatggggatccgggagaaatttgcccactgc

SEQ ID NO: 829 - DNA, 35 bp, Artificial Sequence
  PCR primer
cgcctcgagggagtttgagaccagcctggccaaca

SEQ ID NO: 830 - DNA, 38 bp, Artificial Sequence
  PCR primer
gcatggaccatatgtcagccattgagagggtgtcagag

SEQ ID NO: 831 - DNA, 34 bp, Artificial Sequence
  PCR primer
ccgctcgagaataaggaaaatgaagacaatccag

SEQ ID NO: 832 - DNA, 27 bp, Artificial Sequence
  PCR primer
gttgaattcatgcacgggccccaggtg

SEQ ID NO: 833 - DNA, 30 bp, Artificial Sequence
  PCR primer
cccctcgagtcactatggtctgcctcttga

SEQ ID NO: 834 - DNA, 915 bp, Homo sapiens
atgcatcaccatcaccatcacacggccgcgtccgataacttccagctgtcccagggtgggcagggattcgccattccgatcgggcaggcgatggcgatcgcgggccagatcaagcttcccaccgttcatatcgggcctaccgccttcctcggcttgggtgttgtcgacaacaacggcaacggcgcacgagtccaacgcgtggtcgggagcgctccggcggcaagtctcggcatctccaccggcgacgtgatcaccgcggtcgacggcgctccgatcaactcggccaccgcgatggcggacgcgcttaacgggcatcatcccggtgacgtcatctcggtgacctggcaaaccaagtcgggcggcacgcgtacagggaacgtgacattggccgagggacccccggccgaattcatgcacgggccccaggtgctggcacgctgctccgagtgtgcttgtcctgccttggctgccacctctgcgggggtgcgtctggagggggtggaccggccaccaaccttacccagtcaaggaagtggatggccatgttcccacagcctgagtggctgccacctgatggctgatggagcaaaggccttaggaaaagcagatggcccttggccctacctttttgttagaagaactgatgttccatgtcctgcagcgagtgaggttggtggctgtgcccccagctcctggcgcgccctcgcagaggtgactggttgctctttgggccctcttggccttgcccagcatgcacaagcctcagtgctactactgtgctacaaatggagccatataggggaaacgagcagccatctcaggagcaaggtgtatgctgcctttgggggctccagtccttgcctcaagggtcttatgtcactgtgggcttcttggttgtcaagaggcagaccatag

SEQ ID NO: 835 - protein, 304 aa, Homo sapiens [sequence omitted]

SEQ ID NO: 836 - DNA, 24 bp, Artificial Sequence
  PCR primer
cgaagtcacgtggaggccagcctc

SEQ ID NO: 837 - DNA, 29 bp, Artificial Sequence
  PCR primer
cctgaccgaattcattaactggcctggac

SEQ ID NO: 838 - protein, 166 aa, Homo sapiens
  VARIANT (1)...(166): Xaa = Any Amino Acid
MGHHHHHHVEASLSVRHPEYNRPLLANDLMLIKLDESVSESDTIRSISIASQCPTAGNSCLVSGWGLLANGRMPTVLQCVNVSVVSEEVCSKLYDPLYHPSMFCAGGGQXQXDSCNGDSGGPLICNGYLQGLVSFGKAPCGQVGVPGVYTNLCKFTEWIEKTVQAS

SEQ ID NO: 839 - DNA, 504 bp, Homo sapiens
  misc_feature (1)...(504): n = A,T,C or G
atgggccatcatcatcatcatcacgtggaggccagcctctccgtacggcacccagagtacaacagacccttgctcgctaacgacctcatgctcatcaagttggacgaatccgtgtccgagtctgacaccatccggagcatcagcattgcttcgcagtgccctaccgcggggaactcttgcctcgtttctggctggggtctgctggcgaacggcagaatgcctaccgtgctgcagtgcgtgaacgtgtcggtggtgtctgaggaggtctgcagtaagctctatgacccgctgtaccaccccagcatgttctgcgccggcggagggcaanaccagaangactcctgcaacggtgactctggggggcccctgatctgcaacgggtacttgcagggccttgtgtctttcggaaaagccccgtgtggccaagttggcgtgccaggtgtctacaccaacctctgcaaattcactgagtggatagagaaaaccgtccaggccagttaatga

SEQ ID NO: 840 - DNA, 21 bp, Artificial Sequence
  PCR primer
ctcagggttccggagccgcgg

SEQ ID NO: 841 - DNA, 35 bp, Artificial Sequence
  PCR primer
ctatagaattcattaccaaaaagctgggctccagc

SEQ ID NO: 842 - protein, 241 aa, Homo sapiens
MQHHHHHHLRVPEPRPGEAKAEGAAPPTPSKPLTSFLIQDILRDGAQRQGGRTSSQRQRDPEPEPEPEPEGGRSRAGAQNDQLSTGPRAAPEEAETLAETEPERHLGSYLLDSENTSGALPRLPQTPKQPQKRSRAAFSHTQVIELERKFSHQKYLSAPERAHLAKNLKLTETQVKIWFQNRRYKTKRKQLSSELGDLEKHSSLPALKEEAFSRASLVSVYNSYPYYPYLYCVGSWSPAFW

SEQ ID NO: 843 - DNA, 729 bp, Homo sapiens
atgcagcatcaccaccatcaccacctcagggttccggagccgcggcccggggaggcgaaagcggagggggccgcgccgccgaccccgtccaagccgctcacgtccttcctcatccaggacatcctgcgggacggcgcgcagcggcaaggcggccgcacgagcagccagagacagcgcgacccggagccggagccagagccagagccagagggaggacgcagccgcgccggggcgcagaacgaccagctgagcaccgggccccgcgccgcgccggatgaggccgagacgctggcagagaccgagccagaaaggcacttggggtcttatctgttggactctgaaaacacttcaggcgcccttccaaggcttccccaaacccctaagcagccgcagaagcgctcccgagctgccttctcccacactcaggtgatcgagttggagaggaagttcagccatcagaagtacctgtcggcccctgaacgggcccacctggccaagaacctcaagctcacggagacccaagtgaagatatggttccagaacagacgctataagactaagcgaaagcagctctcctcggagctgggagacttggagaagcactcctttttgccggccctgaaagaggaggccttctcccgggcctccctggtctccgtgtataacagctatccttactacccatacctgcactgcgtgggcagctggagcccagctttttggtaatga

SEQ ID NO: 844 - DNA, 27 bp, Artificial Sequence
  PCR primer
ctactaagcgctggagtgagggatcag

SEQ ID NO: 845 - DNA, 33 bp, Artificial Sequence
  PCR primer
catcgagaattcactactctctgactagatgtc

SEQ ID NO: 846 - protein, 161 aa, Homo sapiens [sequence omitted]

SEQ ID NO: 847 - DNA, 489 bp, Homo sapiens
atgcagcatcaccaccatcaccacgctggagtgagggatcaggggcagggcgcgagatggcctcacacagggaagagagggcccctcctgcagggcctcacctgggccacaggaggacactgcttttcctctgaggagtcaggagctgtggatggtgctggacagaagaaggacagggcctggctcaggtgtccagaggctgtcgctggcttccctttgggatcagactgcagggagggagggcggcagggttgtggggggagtgacgatgaggatgacctgggggtggctccaggccttgcccctgcctgggccctcacccagcctccctcacagtctcctggccctcagtctctcccctccactccatcctccatctggcctcagtgggtcattctgatcactgaactgaccatacccagccctgcccacggccctccatggctccccaatgccctggagaggggacatctagtcagagagtagtga

SEQ ID NO: 848 - protein, 132 aa, Homo sapiens; identical to SEQ ID NO: 819

SEQ ID NO: 849 - DNA, 31 bp, Artificial Sequence
  PCR primer
ggggaattcatcacctatgtgccgcctctgc

SEQ ID NO: 850 - DNA, 40 bp, Artificial Sequence
  PCR primer
gggctcgagtcactcgcccacgaaatccgtgtaaaacagc

SEQ ID NO: 851 - DNA, 1203 bp, Homo sapiens
atgcatcaccatcaccatcacacggccgcgtccgataacttccagctgtcccagggtgggcagggattcgccattccgatcgggcaggcgatggcgatcgcgggccagatcaagcttcccaccgttcatatcgggcctaccgccttcctcggcttgggtgttgtcgacaacaacggcaacggcgcacgagtccaacgcgtggtcgggagcgctccggcggcaagtctcggcatctccaccggcgacgtgatcaccgcggtcgacggcgctccgatcaactcggccaccgcgatggcggacgcgcttaacgggcatcatcccggtgacgtcatctcggtgacctggcaaaccaagtcgggcggcacgcgtacagggaacgtgacattggccgagggacccccggccgaattcatcacctatgtgccgcctctgctgctggaagtgggggtagaggagaagttcatgaccatggtgctgggcattggtccagtgctgggcctggtctgtgtcccgctcctaggctcagccagtgaccactggcgtggacgctatggccgccgccggcccttcatctgggcactgtccttgggcatcctgctgagcctctttctcatcccaagggccggctggctagcagggctgctgtgcccggatcccaggcccctggagctggcactgctcatcctgggcgtggggctgctggacttctgtggccaggtgtgcttcactccactggaggccctgctctctgacctcttccgggacccggaccactgtcgccaggcctactctgtctatgccttcatgatcagtcttgggggctgcctgggctacctcctgcctgccattgactgggacaccagtgccctggccccctacctgggcacccaggaggagtgcctctttggcctgctcaccctcatcttcctcacctgcgtagcagccacactgctggtggctgaggaggcagcgctgggccccaccgagccagcagaagggctgtcggccccctccttgtcgccccactgctgtccatgccgggcccgcttggctttccggaacctgggcgccctgcttccccggctgcaccagctgtgctgccgcatgccccgcaccctgcgccggctcttcgtggctgagctgtgcagctggatggcactcatgaccttcacgctgttttacacggatttcgtgggcgagtga

SEQ ID NO: 852 - protein, 400 aa, Homo sapiens [sequence omitted]

SEQ ID NO: 853 - protein, 20 aa, Homo sapiens
LLPPPPALCGASACDVSVRV

SEQ ID NO: 854 - DNA, 60 bp, Homo sapiens
ctgctcccacctccacccgcgctctgcggggcctctgcctgtgatgtctccgtacgtgtg

SEQ ID NO: 855 - protein, 10 aa, Homo sapiens
ASACDVSVRV

SEQ ID NO: 856 - DNA, 30 bp, Homo sapiens
gcctctgcctgtgatgtctccgtacgtgtg

SEQ ID NO: 857 - protein, 9 aa, Homo sapiens
ASACDVSVR

SEQ ID NO: 858 - protein, 9 aa, Homo sapiens
SACDVSVRV

SEQ ID NO: 859 - DNA, 27 bp, Homo sapiens
tctgcctgtgatgtctccgtacgtgtg

SEQ ID NO: 860 - protein, 19 aa, Homo sapiens
GIGPVLGLVCVPLLGSASD

SEQ ID NO: 861 - protein, 19 aa, Homo sapiens
VPPLLLEVGVEEKFMTMVL

SEQ ID NO: 862 - protein, 19 aa, Homo sapiens
MVQRLWVSRLLRHRKAQLL

SEQ ID NO: 863 - DNA, 57 bp, Homo sapiens
  misc_feature (1)...(57): n = A,T,C or G
ggnathggnccngtnytnggnytngtntgygtnccnytnytnggnwsngcnwsngay

SEQ ID NO: 864 - DNA, 57 bp, Homo sapiens
  misc_feature (1)...(57): n = A,T,C or G
gtnccnccnytnytnytngargtnggngtngargaraarttyatgacnatggtnytn

SEQ ID NO: 865 - DNA, 57 bp, Homo sapiens
  misc_feature (1)...(57): n = A,T,C or G
atggtncarmgnytntgggtnwsnmgnytnytnmgncaymgnaargcncarytnytn

SEQ ID NO: 866 - protein, 9 aa, Homo sapiens
VLQCVNVSV

SEQ ID NO: 867 - protein, 9 aa, Homo sapiens
RMPTVLQCV

SEQ ID NO: 868 - protein, 9 aa, Homo sapiens
NLCKFTEWI

SEQ ID NO: 869 - protein, 9 aa, Homo sapiens
MLIKLDESV

SEQ ID NO: 870 - protein, 9 aa, Homo sapiens
LLANDLMLI

SEQ ID NO: 871 - protein, 10 aa, Homo sapiens
LLANGRMPTV

SEQ ID NO: 872 - protein, 10 aa, Homo sapiens
LMLIKLDESV

SEQ ID NO: 873 - protein, 10 aa, Homo sapiens
VLQCVNVSVV

SEQ ID NO: 874 - protein, 10 aa, Homo sapiens
GLLANGRMPT

SEQ ID NO: 875 - protein, 10 aa, Homo sapiens
TVLQCVNVSV

SEQ ID NO: 876 - protein, 9 aa, Homo sapiens
GVLVHPQWV

SEQ ID NO: 877 - protein, 9 aa, Homo sapiens
VLVHPQWVL

SEQ ID NO: 878 - DNA, 1195 bp, Homo sapiens
ccgagactcacggtcaagctaaggcgaagagtgggtggctgaagccatactattttatagaattaatggaaagcagaaaagacatcacaaaccaagaagaactttggaaaatgaagcctaggagaaatttagaagaagacgattatttgcataaggacacgggagagaccagcatgctaaaaagacctgtgcttttgcatttgcaccaaacagcccatgctgatgaatttgactgcccttcagaacttcagcacacacaggaactctttccacagtggcacttgccaattaaaatagctgctattatagcatctctgacttttctttacactcttctgagggaagtaattcaccctttagcaacttcccatcaacaatatttttataaaattccaatcctggtcatcaacaaagtcttgccaatggtttccatcactctcttggcattggtttacctgccaggtgtgatagcagcaattgtccaacttcataatggaaccaagtataagaagtttccacattggttggataagtggatgttaacaagaaagcagtttgggcttctcagtttcttttttgctgtactgcatgcaatttatagtctgtcttacccaatgaggcgatcctacagatacaagttgctaaactgggcatatcaacaggtccaacaaaataaagaagatgcctggattgagcatgatgtttggagaatggagatttatgtgtctctgggaattgtgggattggcaatactggctctgttggctgtgacatctattccatctgtgagtgactctttgacatggagagaatttcactatattcagagcaagctaggaattgtttcccttctactgggcacaatacacgcattgatttttgcctggaataagtggatagatataaaacaatttgtatggtatacacctccaacttttatgatagctgttttccttccaattgttgtcctgatatttaaaagcatactattcctgccatgcttgaggaagaagatactgaagattagacatggttgggaagacgtcaccaaaattaacaaaactgagatatgttcccagttgtagaattactgtttacacacatttttgttcaatattgatatattttatcaccaacatttcaagtttgtatttgttaataaaatgattattcaaggaaaaaaaaaaaaaaaaaa

SEQ ID NO: 879 - protein, 339 aa, Homo sapiens
MESRKDITNQEELWKMKPRRNLEEDDYLHKDTGETSMLKRPVLLHLHQTAHADEFDCPSELQHTQELFPQWHLPIKIAAIIASLTFLYTLLREVIHPLATSHQQYFYKIPILVINKVLPMVSITLLALVYLPGVIAAIVQLHNGTKYKKFPHWLDKWMLTRKQFGLLSFFFAVLHAIYSLSYPMRRSYRYKLLNWAYQQVQQNKEDAWIEHDVWRMEIYVSLGIVGLAILALLAVTSIPSVSDSLTWREFHYIQSKLGIVSLLLGTIHALIFAWNKWIDIKQFVWYTPPTFMIAVFLPIVVLIFKSILFLPCLRKKILKIRHGWEDVTKINKTEICSQL

SEQ ID NO: 880 - DNA, 2172 bp, Homo sapiens
aaaattgaatattgagataccattctttagtgttaccttttttacccacatgtgtttctgaaaatattggaattttattcatcttaaaaattggacccggccttatttaccatctttaatccattttagtactatgggtgagtacatggaattgaagtctggcttaaatcttcagaaagttatatatctattttattttatttttttgagacagagtctcgctgtgtcacccaggctggagtgcggtgccacaatcttggctcactgcaacctctgagtcccaggttcaagcgatactcatgcctcggcctcctgagtagctgggactacaggcgtgcaccaccacatctggctaatctttttttgtatttttagtagagacggggtttcactgtggtctccatctcctgacctcgtgatccgcctgcctcccaaagtgctgggattacaggcatgagccaccgcacacagctgggactgggtaatttataaagaaaagaggtttaatgactcacagttccgcatggctggagaggcctcaggaaacttacaatcatggtggaaggcgaaggggaagcaaggcacgtcttacatggtggcaggagagaacgagtgaggggggagactgccacaaactttttttttttgagacaagagtctggccctgttgcccaggctggagtgcagtggcatgatctcagctcactgcaacctctgcctcacaggttcaagcaattctcatgcctcagcctcccgcatagctgggaccacaggtatgcaccaccacacctagctaatttttgtagttttagtagagatggggtctcactatgttgctcaggctggtctaaaactcctgggctccagcaatccgcctgccttggcctcccaaagtgctggggttacaggcataagccaccacatccagcctgccacatacttttaaactatcaggtctcatgagaactcatgcactatcacaagaatagcatggggaaaatcccccccataatccaatcacctcccaccaggtctcctccgacacgtgggattgggtggggacacagagccaaaccgtatcagatgctgcaggggctggggacactgagaccactcagacctggtgtctctgtcactcttctgggctctgtctgtctccaggacctccctccccttccatggtatagaaggaaagtgctgtaaggtgcaaattgcacaggaactccttaagacatacatcatccactcagcagttttaggttcgcagcaaaatggagtggaaggaacagaaatttcctgtgcacccctccccgctgtctccgccatatcggcatcctgcatccagagtggtggactggttacaggctatgaacctacactgatgcggcaccaccacccagagtccacgggttatgttggttcacatttactcttgctgtggtatggtctataggtttggacagatgtccgataatcctttttacattttggcatccttgggtagctcgtcttgtaggaatggacttgcttcaaagtggaggcaggcagatccttcagacgggtatatggagccctgttttcagttgcttttctaattctctcttatcgtttacctcaaaatcttcctgaggtctcgcttccttttaaaatccttgtctactttgcagcatcactctgacactccattgattcctcagcacctactgactacacggttaggagtgcaagggtagaattcatgttttattcatctttgggtctgtagcacccagcaaagtgctcagtaaatgcgcagtaattgatttgacctctgaacaaatacacactgtactaagaatctacacaccgaaagacaaaaacaagacaaatttgagtgctacaggtgtcacgcttggcatcacacatgtgcctgtgtattcctctaggtggttaccaggagctctgccactgcatgtccactagtgacgggttcgctccaccaccccagctgggtagccgctgctctcacataaggggtccaattaaaattgccaggaataaattcccccggactttgacttctcaagagctaagaaggtttgctgagtattctggcatgatgtttggtgatcaaacaactgctggccaaaaatgatgagtatttccccctcttgctgaagatgtgctccatac

SEQ ID NO: 881 - DNA, 2455 bp, Homo sapiens
cagcttaaaaatggtttcttgaaatcagtgattagcattcactcaccagtacccctactaaggggtaggcactggtttgtactcctgggaatacaggagtacaccagaatttatttctgcttattgcttttgttgcaaatgccgtggcttcatctgaggaattctagaattcagagggtgtagccctccactctgctgtcttgctatctgctctcattgcatccgtttaacctgcattctgaaagatgtttctcaggtttttccttgacgattttcttcttttctgattctgacaatgttttaaatcattgtactgtggttatcatttctctgcatttattttacccatcttcctttgtaacttgtcctattgtcttttaatttctgcctgttctttatggctttcaacttcataaataacatgttttctcaaatctctttgtgaattccagagagggccaggcacggtggctcacatctgtaatcccagcactttggggaggctgagacgggtggatcacttgaggtcaggagtttgagaccagcctggccaacatggtgaaatcccgtttcactaaaaatacaaaaattacccaggcatggtggcgggcgcctgtaatcccaggtactcgggaggctgagggaggagaatcgcttgaacctgggaggctgagggaggagaatcgcttgaacccgggaggcagaggttgcagtgaaccgagatcatgttgctgcactccagcctggtcaacagagcaagactctgcctcaaaaacaaacaaataaacaaacaaacaaacaaaacagagagattttgctgcaatgtacaaggagcaatttgctcctttaaaaaaataatttttggccaggcacagtggctcacacctgtaatcccagcactttgggaagccaaggtgggtggatcatttgaggtcaggagtttgagatcagcctggccaacatggtgaaacactatctctattaaaaatacaaaaatgtgctcagtgtggtggtgcacatctgtaatctcagcctcccgcatagctgggaccacaggtatgcaccaccacacctagctaatttttgtagttttagtagagatggggtctcactatgttgctcaggctggtctaaaactcctgggctccagcaatccgcctgccttggcctcccaaagtgctggggttacaggcataagccaccacatccagcctgccacatacttttaaactatcaggtctcatgagaactcatgcactatcacaagaatagcatggggaaaatcccccccataatccaatcacctcccaccaggtctcctccgacacgtgggattgggtggggacacagagccaaaccgtatcagatgctgcaggggctggggacactgagaccactcagacctggtgtctctgtcactcttctgggctctgtctgtctccaggacctccctccccttccatggtatagaaggaaagtgctgtaaggtgcaaattgcacaggaactccttaagacatacatcatccactcagcagttttaggttcgcagcaaaatggagtggaaggaacagaaatttcctgtgcacccctccccgctgtctccgccatatcggcatcctgcatccagagtggtggactggttacaggctatgaacctacactgatgcggcaccaccacccagagtccacaggttatgttggttcacatttactcttgctgtggtatggtctataggtttggacagatgtccgataatcctttttacattttggcatccttgggtagctcgtcttgtaggaatggacttgcttcaaagtggaggcaggcagatccttcagacgggtatatggagccctgttttcagttgcttttctaattctctcttatcgtttacctcaaaatcttcctgaggtctcgcttccttttaaaatccttgtctactttgcagcatcactctgacactccattgattcctcagcacctactgactacacggttaggagtgcaagggtagaattcatgttttattcatctttgggtctgtagcacccagcaaagtgctcagtaaatgcgcagtaattgatttgacctctgaacaaatacacactgtactaagaatctacacaccgaaagacaaaaacaagacaaatttgagtgctacaggtgtcacgcttggcatcacacatgtgcctgtgtattcctctaggtggttaccaggagctctgccactgcatgtccactagtgacgggttcgctccaccaccccagctgggtagccgctgctctcacataaggggtccaattaaaattgccaggaataaattcccccggactttgacttctcaagagctaagaaggtttgctgagtattctggcatgatgtttggtgatcaaacaactgctggccaaaaatgatgagtatttccccctcttgctgaagatgtgctccatac

SEQ ID NO: 882 - DNA, 2455 bp, Homo sapiens; identical to SEQ ID NO: 881

SEQ ID NO: 883 - protein, 62 aa, Homo sapiens; identical to SEQ ID NO: 574

SEQ ID NO: 884 - protein, 135 aa, Homo sapiens [sequence omitted]

SEQ ID NO: 885 - protein, 77 aa, Homo sapiens
MHYHKNSMGKIPPIIQSPPTRSPPTRGIGWGHRAKPYQMLQGLGTLRPLRPGVSVTLLGSVCLQDLPPLPWYRRKVL

SEQ ID NO: 886 - protein, 60 aa, Homo sapiens; identical to SEQ ID NO: 586

SEQ ID NO: 887 - protein, 76 aa, Homo sapiens; identical to SEQ ID NO: 584

SEQ ID NO: 888 - protein, 76 aa, Homo sapiens; identical to SEQ ID NO: 575

SEQ ID NO: 889 - protein, 80 aa, Homo sapiens [sequence omitted]

SEQ ID NO: 890 - protein, 72 aa, Homo sapiens
MHYHKNSMGKIPPHNPITSHQVSSDTWDWVGTQSQTVSDAAGAGDTETTQTWCLCHSSGLCLSPGPPSPSMV

SEQ ID NO: 891 - protein, 77 aa, Homo sapiens; identical to SEQ ID NO: 885

SEQ ID NO: 892 - protein, 60 aa, Homo sapiens; identical to SEQ ID NO: 586

SEQ ID NO: 893 - protein, 76 aa, Homo sapiens; identical to SEQ ID NO: 584

SEQ ID NO: 894 - DNA, 2479 bp, Homo sapiens
gtcatattgaacattccagatacctatcattactcgatgctgttgataacagcaagatggctttgaactcagggtcaccaccagctattggaccttactatgaaaaccatggataccaaccggaaaacccctatcccgcacagcccactgtggtccccactgtctacgaggtgcatccggctcagtactacccgtcccccgtgccccagtacgccccgagggtcctgacgcaggcttccaaccccgtcgtctgcacgcagcccaaatccccatccgggacagtgtgcacctcaaagactaagaaagcactgtgcatcaccttgaccctggggaccttcctcgtgggagctgcgctggccgctggcctactctggaagttcatgggcagcaagtgctccaactctgggatagagtgcgactcctcaggtacctgcatcaacccctctaactggtgtgatggcgtgtcacactgccccggcggggaggacgagaatcggtgtgttcgcctctacggaccaaacttcatccttcagatgtactcatctcagaggaagtcctggcaccctgtgtgccaagacgactggaacgagaactacgggcgggcggcctgcagggacatgggctataagaataatttttactctagccaaggaatagtggatgacagcggatccaccagctttatgaaactgaacacaagtgccggcaatgtcgatatctataaaaaactgtaccacagtgatgcctgttcttcaaaagcagtggtttctttacgctgtttagcctgcggggtcaacttgaactcaagccgccagagcaggatcgtgggcggtgagagcgcgctcccgggggcctggccctggcaggtcagcctgcacgtccagaacgtccacgtgtgcggaggctccatcatcacccccgagtggatcgtgacagccgcccactgcgtggaaaaacctcttaacaatccatggcattggacggcatttgcggggattttgagacaatctttcatgttctatggagccggataccaagtacaaaaagtgatttctcatccaaattatgactccaagaccaagaacaatgacattgcgctgatgaagctgcagaagcctctgactttcaacgacctagtgaaaccagtgtgtctgcccaacccaggcatgatgctgcagccagaacagctctgctggatttccgggtggggggccaccgaggagaaagggaagacctcagaagtgctgaacgctgccaaggtgcttctcattgagacacagagatgcaacagcagatatgtctatgacaacctgatcacaccagccatgatctgtgccggcttcctgcaggggaacgtcgattcttgccagggtgacagtggagggcctctggtcacttcgaacaacaatatctggtggctgataggggatacaagctggggttctggctgtgccaaagcttacagaccaggagtgtacgggaatgtgatggtattcacggactggatttatcgacaaatgaaggcaaacggctaatccacatggtcttcgtccttgacgtcgttttacaagaaaacaatggggctggttttgcttccccgtgcatgatttactcttagagatgattcagaggtcacttcatttttattaaacagtgaacttgtctggctttggcactctctgccatactgtgcaggctgcagtggctcccctgcccagcctgctctccctaaccccttgtccgcaaggggtgatggccggctggttgtgggcactggcggtcaattgtggaaggaagagggttggaggctgcccccattgagatcttcctgctgagtcctttccaggggccaattttggatgagcatggagctgtcacttctcagctgctggatgacttgagatgaaaaaggagagacatggaaagggagacagccaggtggcacctgcagcggctgccctctggggccacttggtagtgtccccagcctacttcacaaggggattttgctgatgggttcttagagccttagcagccctggatggtggccagaaataaagggaccagcccttcatgggtggtgacgtggtagtcacttgtaaggggaacagaaacatttttgttcttatggggtgagaatatagacagtgcccttggtgcgagggaagcaattgaaaaggaacttgccctgagcactcctggtgcaggtctccacctgcacattgggtggggctcctgggagggagactcagccttcctcctcatcctccctgaccctgctcctagcaccctggagagtgaatgccccttggtccctggcagggcgccaagtttggcaccatgtcggcctcttcaggcctgatagtcattggaaattgaggtccatgggggaaatcaaggatgctcagtttaaggtacactgtttccatgttatgtttctacacattgatggtggtgaccctgagttcaaagccatctt

SEQ ID NO: 895 - protein, 492 aa, Homo sapiens
MALNSGSPPAIGPYYENHGYQPENPYPAQPTVVPTVYEVHPAQYYPSPVPQYAPRVLTQASNPVVCTQPKSPSGTVCTSKTKKALCITLTLGTFLVGAALAAGLLWKFMGSKCSNSGIECDSSGTCINPSNWCDGVSHCPGGEDENRCVRLYGPNFILQMYSSQRKSWHPVCQDDWNENYGRAACRDMGYKNNFYSSQGIVDDSGSTSFMKLNTSAGNVDIYKKLYHSDACSSKAVVSLRCLACGVNLNSSRQSRIVGGESALPGAWPWQVSLHVQNVHVCGGSIITPEWIVTAAHCVEKPLNNPWHWTAFAGILRQSFMFYGAGYQVQKVISHPNYDSKTKNNDIALMKLQKPLTFNDLVKPVCLPNPGMMLQPEQLCWISGWGATEEKGKTSEVLNAAKVLLIETQRCNSRYVYDNLITPAMICAGFLQGNVDSCQGDSGGPLVTSNNNIWWLIGDTSWGSGCAKAYRPGVYGNVMVFTDWIYRQMKANG

SEQ ID NO: 896 - DNA, 683 bp, Homo sapiens
gtcatattgaacattccagatacctatcattactcgatgctgttgataacagcaagatggctttgaactcagggtcaccaccagctattggaccttactatgaaaaccatggataccaaccggaaaacccctatcccgcacagcccactgtggtccccactgtctacgaggtgcatccggctcagtactacccgtcccccgtgccccagtacgccccgagggtcctgacgcaggcttccaaccccgtcgtctgcacgcagcccaaatccccatccgggacagtgtgcacctcaaagactaagaaagcactgtgcatcaccttgaccctggggaccttcctcgtgggagctgcgctggccgctggcctactctggaagttcatgggcagcaagtgctccaactctgggatagagtgcgactcctcaggtacctgcatcaacccctctaactggtgtgatggcgtgtcacactgccccggcggggaggacgagaatcggtgtgttcgcctctacggaccaaacttcatccttcagatgtactcatctcagaggaagtcctggcaccctgtgtgccaagacgactggaacgagaactacgggcgggcggcctgcagggacatgggctataagaataatttttactctagccaaggaatagtggatgacagcggatccaccagcttt

SEQ ID NO: 897 - protein, 209 aa, Homo sapiens
MALNSGSPPAIGPYYENHGYQPENPYPAQPTVVPTVYEVHPAQYYPSPVPQYAPRVLTQASNPVVCTQPKSPSGTVCTSKTKKALCITLTLGTFLVGAALAAGLLWKFMGSKCSNSGIECDSSGTCINPSNWCDGVSHCPGGEDENRCVRLYGPNFILQMYSSQRKSWHPVCQDDWNENYGRAACRDMGYKNNFYSSQGIVDDSGSTSF

SEQ ID NO: 898 - protein, 27 aa, Homo sapiens
VGEGLYQGVPRAEPGTEARRHYDEGVR

SEQ ID NO: 899 - DNA, 35 bp, Artificial Sequence
  PCR primer
ggatccgccgccaccatgtcactttctagcctgct

SEQ ID NO: 900 - DNA, 27 bp, Artificial Sequence
  PCR primer
gtcgactcagctggaccacagccgcag

SEQ ID NO: 901 - DNA, 34 bp, Artificial Sequence
  PCR primer
ggatccgccgccaccatgggctgcaggctgctct

SEQ ID NO: 902 - DNA, 27 bp, Artificial Sequence
  PCR primer
gtcgactcagaaatcctttctcttgac

SEQ ID NO: 903 - DNA, 936 bp, Homo sapiens
  misc_feature (1)...(): n = A,T,C or G
atgggctgcaggctgntctgctgtgcggttctctgtctcctgggagcggtccccatggaaacgggagttacgcagacaccaagacacctggtcatgggaatgacaaataagaagtctttgaaatgtgaacaacatctgggtcataacgctatgtattggtacaagcaaagtgctaagaagccactggagctcatgtttgtctacagtcttgaagaacgggttgaaaacaacagtgtgccaagtcgcttctcacctgaatgccccaacagctctcacttattccttcacctacacaccctgcagccagaagactcggccctgtatctctgcgccagcagccaagaccggacaagcagctcctacgagcagtacttcgggccgggcaccaggctcacggtcacagaggacctgaaaaacgtgttcccacccgaggtcgctgtgtttgagccatcagaagcagagatctcccacacccaaaaggccacactggtgtgcctggccacaggcttctaccccgaccacgtggagctgagctggtgggtgaatgggaaggaggtgcacagtggggtcagcacagacccgcagcccctcaaggagcagcccgccctcaatgactccagatactgcctgagcagccgcctgagggtctcggccaccttctggcagaacccccgcaaccacttccgctgtcaagtccagttctacgggctctcggagaatgacgagtggacccaggatagggccaaacctgtcacccagatcgtcagcgccgaggcctggggtagagcagactgtggcttcacctccgagtcttaccagcaaggggtcctgtctgccaccatcctctatgagatcttgctagggaaggccaccttgtatgccgtgctggtcagtgccctcgtgctgatggccatggtcaagagaaaggatttctga

SEQ ID NO: 904 - DNA, 834 bp, Homo sapiens
  misc_feature (1)...(): n = A,T,C or G
atgtcactttctagcctgctnaaggtggtcacagcttcactgtggctaggacctggcattgcccagaagataactcaaacccaaccaggaatgttcgtgcaggaaaaggaggctgtgactctggactgcacatatgacaccagtgatcaaagttatggtctcttctggtacaagcagcccagcagtggggaaatgatttttcttatttatcaggggtcttatgacgagcaaaatgcaacagaaggtcgctactcattgaatttccagaaggcaagaaaatccgccaaccttgtcatctccgcttcacaactgggggactcagcaatgtatttctgtgcaatgagagagggcgcgggaggaggaaacaaactcacctttgggacaggcactcagctaaaagtggaactcaatatccagaaccctgaccctgccgtgtaccagctgagagactctaaatccagtgacaagtctgtctgcctattcaccgattttgattctcaaacaaatgtgtcacaaagtaaggattctgatgtgtatatcacagacaaaactgtgctagacatgaggtctatggacttcaagagcaacagtgctgtggcctggagcaacaaatctgactttgcatgtgcaaacgccttcaacaacagcattattccagaagacaccttcttccccagcccagaaagttcctgtgatgtcaagctggtcgagaaaagctttgaaacagatacgaacctaaactttcaaaacctgtcagtgattgggttccgaatcctcctcctgaaagtggccgggtttaatctgctcatgacgctgcggctgtggtccagctga

SEQ ID NO: 905 - protein, 311 aa, Homo sapiens
  variant (1)...(311): Xaa = Any amino acid
MGCRLXCCAVLCLLGAVPMETGVTQTPRHLVMGMTNKKSLKCEQHLGHNAMYWYKQSAKKPLELMFVYSLEERVENNSVPSRFSPECPNSSHLFLHLHTLQPEDSALYLCASSQDRTSSSYEQYFGPGTRLTVTEDLKNVFPPEVAVFEPSEAEISHTQKATLVCLATGFYPDHVELSWWVNGKEVHSGVSTDPQPLKEQPALNDSRYCLSSRLRVSATFWQNPRNHFRCQVQFYGLSENDEWTQDRAKPVTQIVSAEAWGRADCGFTSESYQQGVLSATILYEILLGKATLYAVLVSALVLMAMVKRKDF

SEQ ID NO: 906 - protein, 277 aa, Homo sapiens
MSLSSLLKVVTASLWLGPGIAQKITQTQPGMFVQEKEAVTLDCTYDTSDQSYGLFWYKQPSSGEMIFLIYQGSYDEQNATEGRYSLNFQKARKSANLVISASQLGDSAMYFCAMREGAGGGNKLTFGTGTQLKVELNIQNPDPAVYQLRDSKSSDKSVCLFTDFDSQTNVSQSKDSDVYITDKTVLDMRSMDFKSNSAVAWSNKSDFACANAFNNSIIPEDTFFPSPESSCDVKLVEKSFETDTNLNFQNLSVIGFRILLLKVAGFNLLMTLRLWSS

SEQ ID NO: 907 - DNA, 1536 bp, Homo sapiens
atgtacaacctgttgctgtcctacgacagacatggggaccacctgcagcccctggacctcgtgcccaatcaccagggtctcacccctttcaagctggctggagtggagggtaacactgtgatgtttcagcacctgatgcagaagcggaagcacacccagtggacgtatggaccactgacctcgactctctatgacctcacagagatcgactcctcaggggatgagcagtccctgctggaacttatcatcaccaccaagaagcgggaggctcgccagatcctggaccagacgccggtgaaggagctggtgagcctcaagtggaagcggtacgggcggccgtacttctgcatgctgggtgccatatatctgctgtacatcatctgcttcaccatgtgctgcatctaccgccccctcaagcccaggaccaataaccgcacgagcccccgggacaacaccctcttacagcagaagctacttcaggaagcctacatgacccctaaggacgatatccggctggtcggggagctggtgactgtcattggggctatcatcatcctgctggtagaggttccagacatcttcagaatgggggtcactcgcttctttggacagaccatccttgggggcccattccatgtcctcatcatcacctatgccttcatggtgctggtgaccatggtgatgcggctcatcagtgccagcggggaggtggtacccatgtcctttgcactcgtgctgggctggtgcaacgtcatgtacttcgcccgaggattccagatgctaggccccttcaccatcatgattcagaagatgatttttggcgacctgatgcgattctgctggctgatggctgtggtcatcctgggctttgcttcagccttctatatcatcttccagacagaggaccccgaggagctaggccacttctacgactaccccatggccctgttcagcaccttcgagctgttccttaccatcatcgatggcccagccaactacaacgtggacctgcccttcatgtacagcatcacctatgctgcctttgccatcatcgccacactgctcatgctcaacctcctcattgccatgatgggcgacactcactggcgagtggcccatgagcgggatgagctgtggagggcccagattgtggccaccacggtgatgctggagcggaagctgcctcgctgcctgtggcctcgctccgggatctgcggacgggagtatggcctgggagaccgctggttcctgcgggtggaagacaggcaagatctcaaccggcagcggatccaacgctacgcacaggccttccacacccggggctctgaggatttggacaaagactcagtggaaaaactagagctgggctgtcccttcagcccccacctgtcccttcctatgccctcagtgtctcgaagtacctcccgcagcagtgccaattgggaaaggcttcggcaagggaccctgaggagagacctgcgtgggataatcaacaggggtctggaggacggggagagctgggaatatcagatctga

SEQ ID NO: 908 - DNA, 1533 bp, Homo sapiens
atgtacaacctgttgctgtcctacgacagacatggggaccacctgcagcccctggacctcgtgcccaatcaccagggtctcacccctttcaagctggctggagtggagggtaacactgtgatgtttcagcacctgatgcagaagcggaagcacacccagtggacgtatggaccactgacctcgactctctatgacctcacagagatcgactcctcaggggatgagcagtccctgctggaacttatcatcaccaccaagaagcgggaggctcgccagatcctggaccagacgccggtgaaggagctggtgagcctcaagtggaagcggtacgggcggccgtacttctgcatgctgggtgccatatatctgctgtacatcatctgcttcaccatgtgctgcatctaccgccccctcaagcccaggaccaataaccgcacgagcccccgggacaacaccctcttacagcagaagctacttcaggaagcctacatgacccctaaggacgatatccggctggtcggggagctggtgactgtcattggggctatcatcatcctgctggtagaggttccagacatcttcagaatgggggtcactcgcttctttggacagaccatccttgggggcccattccatgtcctcatcatcacctatgccttcatggtgctggtgaccatggtgatgcggctcatcagtgccagcggggaggtggtacccatgtcctttgcactcgtgctgggctggtgcaacgtcatgtacttcgcccgaggattccagatgctaggccccttcaccatcatgattcagaagatgatttttggcgacctgatgcgattctgctggctgatggctgtggtcatcctgggctttgcttcagccttctatatcatcttccagacagaggaccccgaggagctaggccacttctacgactaccccatggccctgttcagcaccttcgagctgttccttaccatcatcgatggcccagccaactacaacgtggacctgcccttcatgtacagcatcacctatgctgcctttgccatcatcgccacactgctcatgctcaacctcctcattgccatgatgggcgacactcactggcgagtggcccatgagcgggatgagctgtggagggcccagattgtggccaccacggtgatgctggagcggaagctgcctcgctgcctgtggcctcgctccgggatctgcggacgggagtatggcctgggagaccgctggttcctgcgggtggaagacaggcaagatctcaaccggcagcggatccaacgctacgcacaggccttccacacccggggctctgaggatttggacaaagactcagtggaaaaactagagctgggctgtcccttcagcccccacctgtcccttcctatgccctcagtgtctcgaagtacctcccgcagcagtgccaattgggaaaggcttcggcaagggaccctgaggagagacctgcgtgggataatcaacaggggtctggaggacggggagagctgggaatatcagatc

SEQ ID NO: 909 - protein, 511 aa, Homo sapiens
MYNLLLSYDRHGDHLQPLDLVPNHQGLTPFKLAGVEGNTVMFQHLMQKRKHTQWTYGPLTSTLYDLTEIDSSGDEQSLLELIITTKKREARQILDQTPVKELVSLKWKRYGRPYFCMLGAIYLLYIICFTMCCIYRPLKPRTNNRTSPRDNTLLQQKLLQEAYMTPKDDIRLVGELVTVIGAIIILLVEVPDIFRMGVTRFFGQTILGGPFHVLIITYAFMVLVTMVMRLISASGEVVPMSFALVLGWCNVMYFARGFQMLGPFTIMIQKMIFGDLMRFCWLMAVVILGFASAFYIIFQTEDPEELGHFYDYPMALFSTFELFLTIIDGPANYNVDLPFMYSITYAAFAIIATLLMLNLLIAMMGDTHWRVAHERDELWRAQIVATTVMLERKLPRCLWPRSGICGREYGLGDRWFLRVEDRQDLNRQRIQRYAQAFHTRGSEDLDKDSVEKLELGCPFSPHLSLPMPSVSRSTSRSSANWERLRQGTLRRDLRGIINRGLEDGESWEYQI

SEQ ID NO: 910 - protein, 134 aa, Homo sapiens
MYNLLLSYDRHGDHLQPLDLVPNHQGLTPFKLAGVEGNTVMFQHLMQKRKHTQWTYGPLTSTLYDLTEIDSSGDEQSLLELIITTKKREARQILDQTPVKELVSLKWKRYGRPYFCMLGAIYLLYIICFTMCCI

SEQ ID NO: 911 - protein, 55 aa, Homo sapiens
AYRPLKPRTNNRTSPRDNTLLQQKLLQEAYMTPKDDIRLVGELVTVIGAIIILLV

SEQ ID NO: 912 - protein, 39 aa, Homo sapiens
EVPDIFRMGVTRFFGQTILGGPFHVLIITYAFMVLVTMV

SEQ ID NO: 913 - protein, 19 aa, Homo sapiens
MRLISASGEVVPMSFALVL

SEQ ID NO: 914 - protein, 52 aa, Homo sapiens
GWCNVMYFARGFQMLGPFTIMIQKMIFGDLMRFCWLMAVVILGFASAFYIIF

SEQ ID NO: 915 - protein, 213 aa, Homo sapiens
QTEDPEELGHFYDYPMALFSTFELFLTIIDGPANYNVDLPFMYSITYAAFAIIATLLMLNLLIAMMGDTHWRVAHERDELWRAQIVATTVMLERKLPRCLWPRSGICGREYGLGDRWFLRVEDRQDLNRQRIQRYAQAFHTRGSEDLDKDSVEKLELGCPFSPHLSLPMPSVSRSTSRSSANWERLRQGTLRRDLRGIINRGLEDGESWEYQI

SEQ ID NO: 916 - DNA, 1302 bp, Homo sapiens
tggacaaagggggtcacacattccttccatacggttgagcctctacctgcctggtgctggtcacagttcagcttcttcatgatggtggatcccaatggcaatgaatccagtgctacatacttcatcctaataggcctccctggtttagaagaggctcagttctggttggccttcccattgtgctccctctaccttattgctgtgctaggtaacttgacaatcatctacattgtgcggactgagcacagcctgcatgagcccatgtatatatttctttgcatgctttcaggcattgacatcctcatctccacctcatccatgcccaaaatgctggccatcttctggttcaattccactaccatccagtttgatgcttgtctgctacagatgtttgccatccactccttatctggcatggaatccacagtgctgctggccatggcttttgaccgctatgtggccatctgtcacccactgcgccatgccacagtacttacgttgcctcgtgtcaccaaaattggtgtggctgctgtggtgcggggggctgcactgatggcaccccttcctgtcttcatcaagcagctgcccttctgccgctccaatatcctttcccattcctactgcctacaccaagatgtcatgaagctggcctgtgatgatatccgggtcaatgtcgtctatggccttatcgtcatcatctccgccattggcctggactcacttctcatctccttctcatatctgcttattcttaagactgtgttgggcttgacacgtgaagcccaggccaaggcatttggcacttgcgtctctcatgtgtgtgctgtgttcatattctatgtacctttcattggattgtccatggtgcatcgctttagcaagcggcgtgactctccgctgcccgtcatcttggccaatatctatctgctggttcctcctgtgctcaacccaattgtctatggagtgaagacaaaggagattcgacagcgcatccttcgacttttccatgtggccacacacgcttcagagccctaggtgtcagtgatcaaacttcttttccattcagagtcctctgattcagattttaatgttaacattttggaagacagtattcagaaaaaaaatttccttaataaaaatacaactcagatccttcaaatatgaaactggttggggaatctccattttttcaatattattttcttctttgttttcttgctacatataattattaataccctgactaggttgtggtttgagggttattacttttcattttaccatgcagtccaaatctaaact

SEQ ID NO: 917 - DNA, 2061 bp, Homo sapiens
acgattcgacagcgcatccttcgacttttccatgtggccacacacgcttcagagccctaggtgtcagtgatcaaacttcttttccattcagagtcctctgattcagattttaatgttaacattttggaagacagtattcagaaaaaaaatttccttaataaaaatacaactcagatccttcaaatatgaaactggttggggaatctccattttttcaatattattttcttctttgttttcttgctacatataattattaataccctgactaggttgtggttggagggttattacttttcattttaccatgcagtccaaatctaaactgcttctactgatggtttacagcattctgagataagaatggtacatctagagaacatttgccaaaggcctaagcacggcaaaggaaaataaacacagaatataataaaatgagataatctagcttaaaactataacttcctcttcagaactcccaaccacattggatctcagaaaaatgctgtcttcaaaatgacttctacagagaagaaataatttttcctctggacactagcacttaaggggaagattggaagtaaagccttgaaaagagtacatttacctacgttaatgaaagttgacacactgttctgagagttttcacagcatatggaccctgtttttcctatttaattttcttatcaaccctttaattaggcaaagatattattagtaccctcattgtagccatgggaaaattgatgttcagtggggatcagtgaattaaatggggtcatacaagtataaaaattaaaaaaaaaggacttcatgcccaatctcatatgatgtggaagaactgttagagagaccaacagggtagtgggttagagatttccagagtcttacattttctagaggaggtatttaatttcttctcactcatccagtgttgtatttaggaatttcctggcaacagaactcatggctttaatcccactagctattgcttattgtcctggtccaattgccaattacctgtgtcttggaagaagtgatttctaggttcaccattatggaagattcttattcagaaagtctgcatagggcttatagcaagttatttatttttaaaagttccataggtgattctgataggcagtgaggttagggagccaccagttatgatgggaagtatggaatggcaggtcttgaagataacattggccttttgagtgtgactcgtagctggaaagtgagggaatcttcaggaccatgctttatttggggctttgtgcagtatggaacagggactttgagaccaggaaagcaatctgacttaggcatgggaatcaggcatttttgcttctgaggggctattaccaagggttaataggtttcatcttcaacaggatatgacaacagtgttaaccaagaaactcaaattacaaatactaaaacatgtgatcatatatgtggtaagtttcattttctttttcaatcctcaggttccctgatatggattcctataacatgctttcatccccttttgtaatggatatcatatttggaaatgcctatttaatacttgtatttgctgctggactgtaagcccatgagggcactgtttattattgaatgtcatctctgttcatcattgactgctctttgctcatcattgaatcccccagcaaagtgcctagaacataatagtgcttatgcttgacaccggttatttttcatcaaacctgattccttctgtcctgaacacatagccaggcaattttccagccttctttgagttgggtattattaaattctggccattacttccaatgtgagtggaagtgacatgtgcaatttctatacctggctcataaaaccctcccatgtgcagcctttcatgttgacattaaatgtgacttgggaagctatgtgttacacagagtaaatcaccagaagcctggatttctgaaaaaactgtgcagagccaaacctctgtcatttgcaactcccacttgtatttgtacgaggcagttggataagtgaaaaataaagtactattgtgtcaagtctctg

SEQ ID NO: 918 - DNA, 957 bp, Homo sapiens
atgatggtggatcccaatggcaatgaatccagtgctacatacttcatcctaataggcctccctggtttagaagaggctcagttctggttggccttcccattgtgctccctctaccttattgctgtgctaggtaacttgacaatcatctacattgtgcggactgagcacagcctgcatgagcccatgtatatatttctttgcatgctttcaggcattgacatcctcatctccacctcatccatgcccaaaatgctggccatcttctggttcaattccactaccatccagtttgatgcttgtctgctacagatgtttgccatccactccttatctggcatggaatccacagtgctgctggccatggcttttgaccgctatgtggccatctgtcacccactgcgccatgccacagtacttacgttgcctcgtgtcaccaaaattggtgtggctgctgtggtgcggggggctgcactgatggcaccccttcctgtcttcatcaagcagctgcccttctgccgctccaatatcctttcccattcctactgcctacaccaagatgtcatgaagctggcctgtgatgatatccgggtcaatgtcgtctatggccttatcgtcatcatctccgccattggcctggactcacttctcatctccttctcatatctgcttattcttaagactgtgttgggcttgacacgtgaagcccaggccaaggcatttggcacttgcgtctctcatgtgtgtgctgtgttcatattctatgtacctttcattggattgtccatggtgcatcgctttagcaagcggcgtgactctccgctgcccgtcatcttggccaatatctatctgctggttcctcctgtgctcaacccaattgtctatggagtgaagacaaaggagattcgacagcgcatccttcgacttttccatgtggccacacacgcttcagagccctag

SEQ ID NO: 919 - DNA, 954 bp, Homo sapiens
atgatggtggatcccaatggcaatgaatccagtgctacatacttcatcctaataggcctccctggtttagaagaggctcagttctggttggccttcccattgtgctccctctaccttattgctgtgctaggtaacttgacaatcatctacattgtgcggactgagcacagcctgcatgagcccatgtatatatttctttgcatgctttcaggcattgacatcctcatctccacctcatccatgcccaaaatgctggccatcttctggttcaattccactaccatccagtttgatgcttgtctgctacagatgtttgccatccactccttatctggcatggaatccacagtgctgctggccatggcttttgaccgctatgtggccatctgtcacccactgcgccatgccacagtacttacgttgcctcgtgtcaccaaaattggtgtggctgctgtggtgcggggggctgcactgatggcaccccttcctgtcttcatcaagcagctgcccttctgccgctccaatatcctttcccattcctactgcctacaccaagatgtcatgaagctggcctgtgatgatatccgggtcaatgtcgtctatggccttatcgtcatcatctccgccattggcctggactcacttctcatctccttctcatatctgcttattcttaagactgtgttgggcttgacacgtgaagcccaggccaaggcatttggcacttgcgtctctcatgtgtgtgctgtgttcatattctatgtacctttcattggattgtccatggtgcatcgctttagcaagcggcgtgactctccgctgcccgtcatcttggccaatatctatctgctggttcctcctgtgctcaacccaattgtctatggagtgaagacaaaggagattcgacagcgcatccttcgacttttccatgtggccacacacgcttcagagccc

SEQ ID NO: 920 - protein, 318 aa, Homo sapiens
MMVDPNGNESSATYFILIGLPGLEEAQFWLAFPLCSLYLIAVLGNLTIIYIVRTEHSLHEPMYIFLCMLSGIDILISTSSMPKMLAIFWFNSTTIQFDACLLQMFAIHSLSGMESTVLLAMAFDRYVAICHPLRHATVLTLPRVTKIGVAAVVRGAALMAPLPVFIKQLPFCRSNILSHSYCLHQDVMKLACDDIRVNVVYGLIVIISAIGLDSLLISFSYLLILKTVLGLTREAQAKAFGTCVSHVCAVFIFYVPFIGLSMVHRFSKRRDSPLPVILANIYLLVPPVLNPIVYGVKTKEIRQRILRLFHVATHASEP

SEQ ID NO: 921 - protein, 28 aa, Homo sapiens
MMVDPNGNESSATYFILIGLPGLEEAQF

SEQ ID NO: 922 - protein, 9 aa, Homo sapiens
RTEHSLHEP

SEQ ID NO: 923 - protein, 21 aa, Homo sapiens
KMLAIFWFNSTTIQFDACLLQ

SEQ ID NO: 924 - protein, 20 aa, Homo sapiens
DRYVAICHPLRHATVLTLPR

SEQ ID NO: 925 - protein, 37 aa, Homo sapiens
FIKQLPFCRSNILSHSYCLHQDVMKLACDDIRVNVVY

SEQ ID NO: 926 - protein, 13 aa, Homo sapiens
KTVLGLTREAQAK

SEQ ID NO: 927 - protein, 10 aa, Homo sapiens
VHRFSKRRDS

SEQ ID NO: 928 - protein, 22 aa, Homo sapiens
KTKEIRQRILRLFHVATHASEP

SEQ ID NO: 929 - DNA, 3245 bp, Homo sapiens
gtcgacccacgcgtccgcgcgagctaagcaggaggcggaggcggaggcggagggcgaggggcggggagcgccgcctggagcgcggcaggtcatattgaacattccagatacctatcattactcgatgctgttgataacagcaagatggctttgaactcagggtcaccaccagctattggaccttactatgaaaaccatggataccaaccggaaaacccctatcccgcacagcccactgtggtccccactgtctacgaggtgcatccggctcagtactacccgtcccccgtgccccagtacgccccgagggtcctgacgcaggcttccaaccccgtcgtctgcacgcagcccaaatccccatccgggacagtgtgcacctcaaagactaagaaagcactgtgcatcaccttgaccctggggaccttcctcgtgggagctgcgctggccgctggcctactctggaagttcatgggcagcaagtgctccaactctgggatagagtgcgactcctcaggtacctgcatcaacccctctaactggtgtgatggcgtgtcacactgccccggcggggaggacgagaatcggtgtgttcgcctctacggatcaaacttcatccttcaggtgtactcatctcagaggaagtcctggcaccctgtgtgccaagacgactggaacgagaactacgggcgggcggcctgcagggacatgggctataagaataatttttactctagccaaggaatagtggatgacagcggatccaccagctttatgaaactgaacacaagtgccggcaatgtcgatatctataaaaaactgtaccacagtgatgcctgttcttcaaaagcagtggtttctttacgctgtatagcctgcggggtcaacttgaactcaagccgccagagcaggattgtgggcggcgagagcgcgctcccgggggcctggccctggcaggtcagcctgcacgtccagaacgtccacgtgtgcggaggctccatcatcacccccgagtggatcgtgacagccgcccactgcgtggaaaaacctcttaacaatccatggcattggacggcatttgcggggattttgagacaatctttcatgttctatggagccggataccaagtagaaaaagtgatttctcatccaaattatgactccaagaccaagaacaatgacattgcgctgatgaagctgcagaagcctctgactttcaacgacctagtgaaaccagtgtgtctgcccaacccaggcatgatgctgcagccagaacagctctgctggatttccgggtggggggccaccgaggagaaagggaagacctcagaagtgctgaacgctgccaaggtgcttctcattgagacacagagatgcaacagcagatatgtctatgacaacctgatcacaccagccatgatctgtgccggcttcctgcaggggaacgtcgattcttgccagggtgacagtggagggcctctggtcacttcgaagaacaatatctggtggctgataggggatacaagctggggttctggctgtgccaaagcttacagaccaggagtgtacgggaatgtgatggtattcacggactggatttatcgacaaatgagggcagacggctaatccacatggtcttcgtccttgacgtcgttttacaagaaaacaatggggctggttttgcttccccgtgcatgatttactcttagagatgattcagaggtcacttcatttttattaaacagtgaacttgtctggctttggcactctctgccattctgtgcaggctgcagtggctcccctgcccagcctgctctccctaaccccttgtccgcaaggggtgatggccggctggttgtgggcactggcggtcaagtgtggaggagaggggtggaggctgccccattgagatcttcctgctgagtcctttccaggggccaattttggatgagcatggagctgtcacctctcagctgctggatgacttgagatgaaaaaggagagacatggaaagggagacagccaggtggcacctgcagcggctgccctctggggccacttggtagtgtccccagcctacctctccacaaggggattttgctgatgggttcttagagccttagcagccctggatggtggccagaaataaagggaccagcccttcatgggtggtgacgtggtagtcacttgtaaggggaacagaaacatttttgttcttatggggtgagaatatagacagtgcccttggtgcgagggaagcaattgaaaaggaacttgccctgagcactcctggtgcaggtctccacctgcacattgggtggggctcctgggagggagactcagccttcctcctcatcctccctgaccctgctcctagcaccctggagagtgcacatgccccttggtcctggcagggcgccaagtctggcaccatgttggcctcttcaggcctgctagtcactggaaattgaggtccatgggggaaatcaaggatgctcagtttaaggtacactgtttccatgttatgtttctacacattgctacctcagtgctcctggaaacttagcttttgatgtctccaagtagtccaccttcatttaactctttgaaactgtatcatctttgccaagtaagagtggtggcctatttcagctgctttgacaaaatgactggctcctgacttaacgttctataaatgaatgtgctgaagcaaagtgcccatggtggcggcgaagaagagaaagatgtgttttgttttggactctctgtggtcccttccaatgctgtgggtttccaaccaggggaagggtcccttttgcattgccaagtgccataaccatgagcactactctaccatggttctgcctcctggccaagcaggctggtttgcaagaatgaaatgaatgattctacagctaggacttaaccttgaaatggaaagtcttgcaatcccatttgcaggatccgtctgtgcacatgcctctgtagagagcagcattcccagggaccttggaaacagttggcactgtaaggtgcttgctccccaagacacatcctaaaaggtgttgtaatggtgaaaacgtcttccttctttattgccccttcttatttatgtgaacaactgtttgtctttttttgtatcttttttaaactgtaaagttcaattgtgaaaatgaatatcatgcaaataaattatgcgatttttttttcaaagtaaaaaaaaaaaaaaaaaaaaaaagggcggccgc

SEQ ID NO: 930 - DNA, 1479 bp, Homo sapiens
atggctttgaactcagggtcaccaccagctattggaccttactatgaaaaccatggataccaaccggaaaacccctatcccgcacagcccactgtggtccccactgtctacgaggtgcatccggctcagtactacccgtcccccgtgccccagtacgccccgagggtcctgacgcaggcttccaaccccgtcgtctgcacgcagcccaaatccccatccgggacagtgtgcacctcaaagactaagaaagcactgtgcatcaccttgaccctggggaccttcctcgtgggagctgcgctggccgctggcctactctggaagttcatgggcagcaagtgctccaactctgggatagagtgcgactcctcaggtacctgcatcaacccctctaactggtgtgatggcgtgtcacactgccccggcggggaggacgagaatcggtgtgttcgcctctacggatcaaacttcatccttcaggtgtactcatctcagaggaagtcctggcaccctgtgtgccaagacgactggaacgagaactacgggcgggcggcctgcagggacatgggctataagaataatttttactctagccaaggaatagtggatgacagcggatccaccagctttatgaaactgaacacaagtgccggcaatgtcgatatctataaaaaactgtaccacagtgatgcctgttcttcaaaagcagtggtttctttacgctgtatagcctgcggggtcaacttgaactcaagccgccagagcaggattgtgggcggcgagagcgcgctcccgggggcctggccctggcaggtcagcctgcacgtccagaacgtccacgtgtgcggaggctccatcatcacccccgagtggatcgtgacagccgcccactgcgtggaaaaacctcttaacaatccatggcattggacggcatttgcggggattttgagacaatctttcatgttctatggagccggataccaagtagaaaaagtgatttctcatccaaattatgactccaagaccaagaacaatgacattgcgctgatgaagctgcagaagcctctgactttcaacgacctagtgaaaccagtgtgtctgcccaacccaggcatgatgctgcagccagaacagctctgctggatttccgggtggggggccaccgaggagaaagggaagacctcagaagtgctgaacgctgccaaggtgcttctcattgagacacagagatgcaacagcagatatgtctatgacaacctgatcacaccagccatgatctgtgccggcttcctgcaggggaacgtcgattcttgccagggtgacagtggagggcctctggtcacttcgaagaacaatatctggtggctgataggggatacaagctggggttctggctgtgccaaagcttacagaccaggagtgtacgggaatgtgatggtattcacggactggatttatcgacaaatgagggcagacggctaa

SEQ ID NO: 931 - DNA, 1476 bp, Homo sapiens
atggctttgaactcagggtcaccaccagctattggaccttactatgaaaaccatggataccaaccggaaaacccctatcccgcacagcccactgtggtccccactgtctacgaggtgcatccggctcagtactacccgtcccccgtgccccagtacgccccgagggtcctgacgcaggcttccaaccccgtcgtctgcacgcagcccaaatccccatccgggacagtgtgcacctcaaagactaagaaagcactgtgcatcaccttgaccctggggaccttcctcgtgggagctgcgctggccgctggcctactctggaagttcatgggcagcaagtgctccaactctgggatagagtgcgactcctcaggtacctgcatcaacccctctaactggtgtgatggcgtgtcacactgccccggcggggaggacgagaatcggtgtgttcgcctctacggatcaaacttcatccttcaggtgtactcatctcagaggaagtcctggcaccctgtgtgccaagacgactggaacgagaactacgggcgggcggcctgcagggacatgggctataagaataatttttactctagccaaggaatagtggatgacagcggatccaccagctttatgaaactgaacacaagtgccggcaatgtcgatatctataaaaaactgtaccacagtgatgcctgttcttcaaaagcagtggtttctttacgctgtatagcctgcggggtcaacttgaactcaagccgccagagcaggattgtgggcggcgagagcgcgctcccgggggcctggccctggcaggtcagcctgcacgtccagaacgtccacgtgtgcggaggctccatcatcacccccgagtggatcgtgacagccgcccactgcgtggaaaaacctcttaacaatccatggcattggacggcatttgcggggattttgagacaatctttcatgttctatggagccggataccaagtagaaaaagtgatttctcatccaaattatgactccaagaccaagaacaatgacattgcgctgatgaagctgcagaagcctctgactttcaacgacctagtgaaaccagtgtgtctgcccaacccaggcatgatgctgcagccagaacagctctgctggatttccgggtggggggccaccgaggagaaagggaagacctcagaagtgctgaacgctgccaaggtgcttctcattgagacacagagatgcaacagcagatatgtctatgacaacctgatcacaccagccatgatctgtgccggcttcctgcaggggaacgtcgattcttgccagggtgacagtggagggcctctggtcacttcgaagaacaatatctggtggctgataggggatacaagctggggttctggctgtgccaaagcttacagaccaggagtgtacgggaatgtgatggtattcacggactggatttatcgacaaatgagggcagacggc

SEQ ID NO: 932 - protein, 492 aa, Homo sapiens
MALNSGSPPAIGPYYENHGYQPENPYPAQPTVVPTVYEVHPAQYYPSPVPQYAPRVLTQASNPVVCTQPKSPSGTVCTSKTKKALCITLTLGTFLVGAALAAGLLWKFMGSKCSNSGIECDSSGTCINPSNWCDGVSHCPGGEDENRCVRLYGSNFILQVYSSQRKSWHPVCQDDWNENYGRAACRDMGYKNNFYSSQGIVDDSGSTSFMKLNTSAGNVDIYKKLYHSDACSSKAVVSLRCIACGVNLNSSRQSRIVGGESALPGAWPWQVSLHVQNVHVCGGSIITPEWIVTAAHCVEKPLNNPWHWTAFAGILRQSFMFYGAGYQVEKVISHPNYDSKTKNNDIALMKLQKPLTFNDLVKPVCLPNPGMMLQPEQLCWISGWGATEEKGKTSEVLNAAKVLLIETQRCNSRYVYDNLITPAMICAGFLQGNVDSCQGDSGGPLVTSKNNIWWLIGDTSWGSGCAKAYRPGVYGNVMVFTDWIYRQMRADG

SEQ ID NO: 933 - protein, 100 aa, Homo sapiens
MALNSGSPPAIGPYYENHGYQPENPYPAQPTVVPTVYEVHPAQYYPSPVPQYAPRVLTQASNPVVCTQPKSPSGTVCTSKTKKALCITLTLGTFLVGAAL

SEQ ID NO: 934 - protein, 393 aa, Homo sapiens
LAAGLLWKFMGSKCSNSGIECDSSGTCINPSNWCDGVSHCPGGEDENRCVRLYGSNFILQVYSSQRKSWHPVCQDDWNENYGRAACRDMGYKNNFYSSQGIVDDSGSTSFMKLNTSAGNVDIYKKLYHSDACSSKAVVSLRCIACGVNLNSSRQSRIVGGESALPGAWPWQVSLHVQNVHVCGGSIITPEWIVTAAHCVEKPLNNPWHWTAFAGILRQSFMFYGAGYQVEKVISHPNYDSKTKNNDIALMKLQKPLTFNDLVKPVCLPNPGMMLQPEQLCWISGWGATEEKGKTSEVLNAAKVLLIETQRCNSRYVYDNLITPAMICAGFLQGNVDSCQGDSGGPLVTSKNNIWWLIGDTSWGSGCAKAYRPGVYGNVMVFTDWIYRQMRADG

SEQ ID NO: 935 - DNA, 22 bp, Artificial Sequence
  PCR Primer
gtgctgtgggagtccccgcggc

SEQ ID NO: 936 - DNA, 36 bp, Artificial Sequence
  PCR Primer
cgtgaactcgagtcattagattaacctcgtggacgc

SEQ ID NO: 937 - DNA, 22 bp, Artificial Sequence
  PCR Primer
gtgctgtgggagtccccgcggc

SEQ ID NO: 938 - DNA, 1158 bp, Homo sapiens
catatgcagcatcaccaccatcaccacgtgctgtgggagtccccgcggcagtgcagcagctggacactttgcgagggcttttgctggctgctgctgctgcccgtcatgctactcatcgtagcccgcccggtgaagctcgctgctttccctacctccttaagtgactgccaaacgcccaccggctggaattgctctggttatgatgacagagaaaatgatctcttcctctgtgacaccaacacctgtaaatttgatggggaatgtttaagaattggagacactgtgacttgcgtctgtcagttcaagtgcaacaatgactatgtgcctgtgtgtggctccaatggggagagctaccagaatgagtgttacctgcgacaggctgcatgcaaacagcagagtgagatacttgtggtgtcagaaggatcatgtgccacagatgcaggatcaggatctggagatggagtccatgaaggctctggagaaactagtcaaaaggagacatccacctgtgatatttgccagtttggtgcagaatgtgacgaagatgccgaggatgtctggtgtgtgtgtaatattgactgttctcaaaccaacttcaatcccctctgcgcttctgatgggaaatcttatgataatgcatgccaaatcaaagaagcatcgtgtcagaaacaggagaaaattgaagtcatgtctttgggtcgatgtcaagataacacaactacaactactaagtctgaagatgggcattatgcaagaacagattatgcagagaatgctaacaaattagaagaaagtgccagagaacaccacataccttgtccggaacattacaatggcttctgcatgcatgggaagtgtgagcattctatcaatatgcaggagccatcttgcaggtgtgatgctggttatactggacaacactgtgaaaaaaaggactacagtgttctatacgttgttcccggtcctgtacgatttcagtatgtcttaatcgcagctgtgattggaacaattcagattgctgtcatctgtgtggtggtcctctgcatcacaaggaaatgccccagaagcaacagaattcacagacagaagcaaaatacagggcactacagttcagacaatacaacaagagcgtccacgaggttaatctaatgactcgag

SEQ ID NO: 939 - DNA, 1020 bp, Homo sapiens
atgcagcatcaccaccatcaccacgactgccaaacgcccaccggctggaattgctctggttatgatgacagagaaaatgatctcttcctctgtgacaccaacacctgtaaatttgatggggaatgtttaagaattggagacactgtgacttgcgtctgtcagttcaagtgcaacaatgactatgtgcctgtgtgtggctccaatggggagagctaccagaatgagtgttacctgcgacaggctgcatgcaaacagcagagtgagatacttgtggtgtcagaaggatcatgtgccacagatgcaggatcaggatctggagatggagtccatgaaggctctggagaaactagtcaaaaggagacatccacctgtgatatttgccagtttggtgcagaatgtgacgaagatgccgaggatgtctggtgtgtgtgtaatattgactgttctcaaaccaacttcaatcccctctgcgcttctgatgggaaatcttatgataatgcatgccaaatcaaagaagcatcgtgtcagaaacaggagaaaattgaagtcatgtctttgggtcgatgtcaagataacacaactacaactactaagtctgaagatgggcattatgcaagaacagattatgcagagaatgctaacaaattagaagaaagtgccagagaacaccacataccttgtccggaacattacaatggcttctgcatgcatgggaagtgtgagcattctatcaatatgcaggagccatcttgcaggtgtgatgctggttatactggacaacactgtgaaaaaaaggactacagtgttctatacgttgttcccggtcctgtacgatttcagtatgtcttaatcgcagctgtgattggaacaattcagattgctgtcatctgtgtggtggtcctctgcatcacaaggaaatgccccagaagcaacagaattcacagacagaagcaaaatacagggcactacagttcagacaatacaacaagagcgtccacgaggttaatctaatgactcgag

SEQ ID NO: 940 - protein, 336 aa, Homo sapiens
MQHHHHHHDCQTPTGWNCSGYDDRENDLFLCDTNTCKFDGECLRIGDTVTCVCQFKCNNDYVPVCGSNGESYQNECYLRQAACKQQSEILVVSEGSCATDAGSGSGDGVHEGSGETSQKETSTCDICQFGAECDEDAEDVWCVCNIDCSQTNFNPLCASDGKSYDNACQIKEASCQKQEKIEVMSLGRCQDNTTTTTKSEDGHYARTDYAENANKLEESAREHHIPCPEHYNGFCMHGKCEHSINMQEPSCRCDAGYTGQHCEKKDYSVLYVVPGPVRFQYVLIAAVIGTIQIAVICVVVLCITRKCPRSNRIHRQKQNTGHYSSDNTTRASTRLI

SEQ ID NO: 941 - protein, 381 aa, Homo sapiens
MQHHHHHHVLWESPRQCSSWTLCEGFCWLLLLPVMLLIVARPVKLAAFPTSLSDCQTPTGWNCSGYDDRENDLFLCDTNTCKFDGECLRIGDTVTCVCQFKCNNDYVPVCGSNGESYQNECYLRQAACKQQSEILVVSEGSCATDAGSGSGDGVHEGSGETSQKETSTCDICQFGAECDEDAEDVWCVCNIDCSQTNFNPLCASDGKSYDNACQIKEASCQKQEKIEVMSLGRCQDNTTTTTKSEDGHYARTDYAENANKLEESAREHHIPCPEHYNGFCMHGKCEHSINMQEPSCRCDAGYTGQHCEKKDYSVLYVVPGPVRFQYVLIAAVIGTIQIAVICVVVLCITRKCPRSNRIHRQKQNTGHYSSDNTTRASTRLI

SEQ ID NO: 942 - DNA, 45 bp, Homo sapiens
ctgctggcgaacggcagaatgcctaccgtgctgcagtgcgtgaac

SEQ ID NO: 943 - protein, 15 aa, Homo sapiens
LLANGRMPTVLQCVN

SEQ ID NO: 944 - protein, 750 aa, Homo sapiens
MWNLLHETDSAVATARRPRWLCAGALVLAGGFFLLGFLFGWFIKSSNEATNITPKHNMKAFLDELKAENIKKFLYNFTQIPHLAGTEQNFQLAKQIQSQWKEFGLDSVELAHYDVLLSYPNKTHPNYISIINEDGNEIFNTSLFEPPPPGYENVSDIVPPFSAFSPQGMPEGDLVYVNYARTEDFFKLERDMKINCSGKIVIARYGKVFRGNKVKNAQLAGAKGVILYSDPADYFAPGVKSYPDGWNLPGGGVQRGNILNLNGAGDPLTPGYPANEYAYRRGIAEAVGLPSIPVHPIGYYDAQKLLEKMGGSAPPDSSWRGSLKVPYNVGPGFTGNFSTQKVKMHIHSTNEVTRIYNVIGTLRGAVEPDRYVILGGHRDSWVFGGIDPQSGAAVVHEIVRSFGTLKKEGWRPRRTILFASWDAEEFGLLGSTEWAEENSRLLQERGVAYINADSSIEGNYTLRVDCTPLMYSLVHNLTKELKSPDEGFEGKSLYESWTKKSPSPEFSGMPRISKLGSGNDFEVFFQRLGIASGRARYTKNWETNKFSGYPLYHSVYETYELVEKFYDPMFKYHLTVAQVRGGMVFELANSIVLPFDCRDYAVVLRKYADKIYSISMKHPQEMKTYSVSFDSLFSAVKNFTEIASKFSERLQDFDKSNPIVLRMMNDQLMFLERAFIDPLGLPDRPFYRHVIYAPSSHNKYAGESFPGIYDALFDIESKVDPSKAWGEVKRQIYVAAFTVQAAAETLSEVA

SEQ ID NO: 945 - protein, 386 aa, Homo sapiens
MRAAPLLLARAASLSLGFLFLLFFWLDRSVLAKELKFVTLVFRHGDRSPIDTFPTDPIKESSWPQGFGQLTQLGMEQHYELGEYIRKRYRKFLNESYKHEQVYIRSTDVDRTLMSAMTNLAALFPPEGVSIWNPILLWQPIPVHTVPLSEDQLLYLPFRNCPRFQELESETLKSEEFQKRLHPYKDFIATLGKLSGLHGQDLFGIWSKVYDPLYCESVHNFTLPSWATEDTMTKLRELSELSLLSLYGIHKQKEKSRLQGGVLVNEILNHMKRATQIPSYKKLIMYSAHDTTVSGLQMALDVYNGLLPPYASCHLTELYFEKGEYFVEMYYRNETQHEPYPLMLPGCSPSCPLERFAELVGPVIPQDWSTECMTTNSHQGTEDSTD

SEQ ID NO: 946 - protein, 261 aa, Homo sapiens
MWVPVVFLTLSVTWIGAAPLILSRIVGGWECEKHSQPWQVLVASRGRAVCGGVLVHPQWVLTAAHCIRNKSVILLGRHSLFHPEDTGQVFQVSHSFPHPLYDMSLLKNRFLRPGDDSSHDLMLLRLSEPAELTDAVKVMDLPTQEPALGTTCYASGWGSIEPEEFLTPKKLQCVDLHVISNDVCAQVHPQKVTKFMLCAGRWTGGKSTCSGDSGGPLVCNGVLQGITSWGSEPCALPERPSLYTKVVHYRKWIKDTIVANP

SEQ ID NO: 947 - protein, 1079 aa, Homo sapiens [sequence omitted]

SEQ ID NO: 948 - protein, 9 aa, Homo sapiens
FLTLSVTWI

SEQ ID NO: 949 - protein, 9 aa, Homo sapiens
KLQCVDLHV

SEQ ID NO: 950 - protein, 9 aa, Homo sapiens
GVLVHPQWV

SEQ ID NO: 951 - protein, 9 aa, Homo sapiens
VLVHPQWVL

SEQ ID NO: 952 - protein, 9 aa, Homo sapiens
FMLCAGRWT

SEQ ID NO: 953 - protein, 10 aa, Homo sapiens
FLTPKKLQCV

SEQ ID NO: 954 - protein, 10 aa, Homo sapiens
ALPERPSLYT

SEQ ID NO: 955 - protein, 9 aa, Homo sapiens
QVLVASRGR

SEQ ID NO: 956 - protein, 9 aa, Homo sapiens
IVGGWECEK

SEQ ID NO: 957 - protein, 9 aa, Homo sapiens
QVHPQKVTK

SEQ ID NO: 958 - protein, 9 aa, Homo sapiens
VVHYRKWIK

SEQ ID NO: 959 - protein, 10 aa, Homo sapiens
WVLTAAHCIR

SEQ ID NO: 960 - protein, 10 aa, Homo sapiens
DVCAQVHPQK

SEQ ID NO: 961 - protein, 10 aa, Homo sapiens
KVVHYRKWIK

SEQ ID NO: 962 - protein, 10 aa, Homo sapiens
GSEPCALPER

SEQ ID NO: 963 - protein, 10 aa, Homo sapiens
FLTPKKLQCV

SEQ ID NO: 964 - protein, 10 aa, Homo sapiens
VISNDVCAQV

SEQ ID NO: 965 - protein, 9 aa, Homo sapiens
QVHPQKVTK

SEQ ID NO: 966 - protein, 9 aa, Homo sapiens
KLQCVDLHV

SEQ ID NO: 967 - protein, 6 aa, Homo sapiens
LKNRFL

SEQ ID NO: 968 - protein, 6 aa, Homo sapiens
SLFHPE

SEQ ID NO: 969 - protein, 7 aa, Homo sapiens
EELFLTP

SEQ ID NO: 970 - protein, 9 aa, Homo sapiens
TKFMLCAGR

SEQ ID NO: 971 - protein, 9 aa, Homo sapiens
TKVVHYRKW

SEQ ID NO: 972 - protein, 6 aa, Homo sapiens
VHYRKW

SEQ ID NO: 973 - protein, 344 aa, Homo sapiens
MDPNTVSSFQVDCFLWHVRKRVADQELGDAPFLDRLRRDQKSLRGRGSTLGLDIETATRAGKQIVERILKEESDEALKMTMASEEFLTPKKLQCVDLHVISNDVCAQVHPQKVTKFMLCAGRVGEDCSPHSQPWQAALVMENELFCSGVLVHPQWVLSAAHCFQNSYTIGLGLHSLEADQEPGSQMVEASLSVRHPEYNRPLLANDLMLIKLDESVSESDTIRSISIASQCPTAGNSCLVSGWGLLANGRMPTVLQCVNVSVVSEEVCSKLYDPLYHPSMFCAGGGQDQKDSCNGDSGGPLICNGYLQGLVSFGKAPCGQVGVPGVYTNLCKFTEWIEKTVQAS

SEQ ID NO: 974 - protein, 359 aa, Homo sapiens
MVQRLWVSRLLRHRKAQLLLVNLLTFGLEVCLAAGITYVPPLLLEVGVEEKFMTMVLGIGPVLGLVCVPLLGSASDHWRGRYGRRRPFIWALSLGILLSLFLIPRAGWLAGLLCPDPRPLELALLILGVGLLDFCGQVCFTPLEALLSDLFRDPDHCRQAYSVYAFMISLGGCLGYLLPAIDWDTSALAPYLGTQEECLFGLLTLIFLTCVAATLLVAEEAALGPTEPAEGLSAPSLSPHCCPCRARLAFRNLGALLPRLHQLCCRMPRTLRRLFVAELCSWMALMTFTLFYTDFVGEGLYQGVPRAEPGTEARRHYDEGEEFLTPKKLQCVDLHVISNDVCAQVHPQKVTKFMLCAGR

SEQ ID NO: 975 - DNA, 51 bp, Artificial Sequence
  Primer
caattacatatgcatcaccatcaccatcacacggccgcgtccgataacttc

SEQ ID NO: 976 - DNA, 35 bp, Artificial Sequence
  Primer
caattacatatgggccgggggtccctcggccaatg

SEQ ID NO: 977 - DNA, 1758 bp, Homo sapiens
atgcatcaccatcaccatcacacggccgcgtccgataacttccagctgtcccagggtgggcagggattcgccattccgatcgggcaggcgatggcgatcgcgggccagatcaagcttcccaccgttcatatcgggcctaccgccttcctcggcttgggtgttgtcgacaacaacggcaacggcgcacgagtccaacgcgtggtcgggagcgctccggcggcaagtctcggcatctccaccggcgacgtgatcaccgcggtcgacggcgctccgatcaactcggccaccgcgatggcggacgcgcttaacgggcatcatcccggtgacgtcatctcggtgacctggcaaaccaagtcgggcggcacgcgtacagggaacgtgacattggccgagggacccccggcccatatgcatcaccatcaccatcacatcataaacggcgaggactgcagcccgcactcgcagccctggcaggcggcactggtcatggaaaacgaattgttctgctcgggcgtcctggtgcatccgcagtgggtgctgtcagccgcacactgtttccagaactcctacaccatcgggctgggcctgcacagtcttgaggccgaccaagagccagggagccagatggtggaggccagcctctccgtacggcacccagagtacaacagacccttgctcgctaacgacctcatgctcatcaagttggacgaatccgtgtccgagtctgacaccatccggagcatcagcattgcttcgcagtgccctaccgcggggaactcttgcctcgtttctggctggggtctgctggcgaacggcagaatgcctaccgtgctgcagtgcgtgaacgtgtcggtggtgtctgaggaggtctgcagtaagctctatgacccgctgtaccaccccagcatgttctgcgccggcggagggcaagaccagaaggactcctgcaacggtgactctggggggcccctgatctgcaacgggtacttgcagggccttgtgtctttcggaaaagccccgtgtggccaagttggcgtgccaggtgtctacaccaacctctgcaaattcactgagtggatagagaaaaccgtccaggccagtattgtgggaggctgggagtgcgagaagcattcccaaccctggcaggtgcttgtggcctctcgtggcagggcagtctgcggcggtgttctggtgcacccccagtgggtcctcacagctgcccactgcatcaggaacaaaagcgtgatcttgctgggtcggcacagcctgtttcatcctgaagacacaggccaggtatttcaggtcagccacagcttcccacacccgctctacgatatgagcctcctgaagaatcgattcctcaggccaggtgatgactccagccacgacctcatgctgctccgcctgtcagagcctgccgagctcacggatgctgtgaaggtcatggacctgcccacccaggagccagcactggggaccacctgctacgcctcaggctggggcagcattgaaccagaggagttcttgaccccaaagaaacttcagtgtgtggacctccatgttatttccaatgacgtgtgtgcgcaagttcaccctcagaaggtgaccaagttcatgctgtgtgctggacgctggacagggggcaaaagctggggcagtgaaccatgtgccctgcccgaaaggccttccctgtacaccaaggtggtgcattaccggaagtggatcaaggacaccatcgtggccaaccccgaattctaa

SEQ ID NO: 978 - protein, 585 aa, Homo sapiens
MHHHHHHTAASDNFQLSQGGQGFAIPIGQAMAIAGQIKLPTVHIGPTAFLGLGVVDNNGNGARVQRVVGSAPAASLGISTGDVITAVDGAPINSATAMADALNGHHPGDVISVTWQTKSGGTRTGNVTLAEGPPAHMHHHHHHIINGEDCSPHSQPWQAALVMENELFCSGVLVHPQWVLSAAHCFQNSYTIGLGLHSLEADQEPGSQMVEASLSVRHPEYNRPLLANDLMLIKLDESVSESDTIRSISIASQCPTAGNSCLVSGWGLLANGRMPTVLQCVNVSVVSEEVCSKLYDPLYHPSMFCAGGGQDQKDSCNGDSGGPLICNGYLQGLVSFGKAPCGQVGVPGVYTNLCKFTEWIEKTVQASIVGGWECEKHSQPWQVLVASRGRAVCGGVLVHPQWVLTAAHCIRNKSVILLGRHSLFHPEDTGQVFQVSHSFPHPLYDMSLLKNRFLRPGDDSSHDLMLLRLSEPAELTDAVKVMDLPTQEPALGTTCYASGWGSIEPEEFLTPKKLQCVDLHVISNDVCAQVHPQKVTKFMLCAGRWTGGKSWGSEPCALPERPSLYTKVVHYRKWIKDTIVANPEF

SEQ ID NO: 979 - DNA, 1758 bp, Homo sapiens
atgcatcaccatcaccatcacatcataaacggcgaggactgcagcccgcactcgcagccctggcaggcggcactggtcatggaaaacgaattgttctgctcgggcgtcctggtgcatccgcagtgggtgctgtcagccgcacactgtttccagaactcctacaccatcgggctgggcctgcacagtcttgaggccgaccaagagccagggagccagatggtggaggccagcctctccgtacggcacccagagtacaacagacccttgctcgctaacgacctcatgctcatcaagttggacgaatccgtgtccgagtctgacaccatccggagcatcagcattgcttcgcagtgccctaccgcggggaactcttgcctcgtttctggctggggtctgctggcgaacggcagaatgcctaccgtgctgcagtgcgtgaacgtgtcggtggtgtctgaggaggtctgcagtaagctctatgacccgctgtaccaccccagcatgttctgcgccggcggagggcaagaccagaaggactcctgcaacggtgactctggggggcccctgatctgcaacgggtacttgcagggccttgtgtctttcggaaaagccccgtgtggccaagttggcgtgccaggtgtctacaccaacctctgcaaattcactgagtggatagagaaaaccgtccaggccagtaaggagttgaagtttgtgactttggtgtttcggcatggagaccgaagtcccattgacacctttcccactgaccccataaaggaatcctcatggccacaaggatttggccaactcacccagctgggcatggagcagcattatgaacttggagagtatataagaaagagatatagaaaattcttgaatgagtcctataaacatgaacaggtttatattcgaagcacagacgttgaccggactttgatgagtgctatgacaaacctggcagccctgtttcccccagaaggtgtcagcatctggaatcctatcctactctggcagcccatcccggtgcacacagttcctctttctgaagatcagttgctatacctgcctttcaggaactgccctcgttttcaagaacttgagagtgagactttgaaatcagaggaattccagaagaggctgcacccttataaggattttatagctaccttgggaaaactttcaggattacatggccaggacctttttggaatttggagtaaagtctacgaccctttatattgtgagagtgttcacaatttcactttaccctcctgggccactgaggacaccatgactaagttgagagaattgtcagaattgtccctcctgtccctctatggaattcacaagcagaaagagaaatctaggctccaagggggtgtcctggtcaatgaaatcctcaatcacatgaagagagcaactcagataccaagctacaaaaaactcatcatgtattctgcgcatgacactactgtgagtggcctacagatggcgctagatgtttacaacggactccttcctccctatgcttcttgccacttgacggaattgtactttgagaagggggagtactttgtggagatgtactatcggaatgagacgcagcacgagccgtatcccctcatgctacctggctgcagccccagctgtcctctggagaggtttgctgagctggttggccctgtgatccctcaagactggtccacggagtgtatgaccacaaacagccatcaaggtactgaagacagtacagattag

SEQ ID NO: 980 - DNA, 2406 bp, Homo sapiens
atgcatcaccatcaccatcacatcataaacggcgaggactgcagcccgcactcgcagccctggcaggcggcactggtcatggaaaacgaattgttctgctcgggcgtcctggtgcatccgcagtgggtgctgtcagccgcacactgtttccagaactcctacaccatcgggctgggcctgcacagtcttgaggccgaccaagagccagggagccagatggtggaggccagcctctccgtacggcacccagagtacaacagacccttgctcgctaacgacctcatgctcatcaagttggacgaatccgtgtccgagtctgacaccatccggagcatcagcattgcttcgcagtgccctaccgcggggaactcttgcctcgtttctggctggggtctgctggcgaacggcagaatgcctaccgtgctgcagtgcgtgaacgtgtcggtggtgtctgaggaggtctgcagtaagctctatgacccgctgtaccaccccagcatgttctgcgccggcggagggcaagaccagaaggactcctgcaacggtgactctggggggcccctgatctgcaacgggtacttgcagggccttgtgtctttcggaaaagccccgtgtggccaagttggcgtgccaggtgtctacaccaacctctgcaaattcactgagtggatagagaaaaccgtccaggccagtattgtgggaggctgggagtgcgagaagcattcccaaccctggcaggtgcttgtggcctctcgtggcagggcagtctgcggcggtgttctggtgcacccccagtgggtcctcacagctgcccactgcatcaggaacaaaagcgtgatcttgctgggtcggcacagcctgtttcatcctgaagacacaggccaggtatttcaggtcagccacagcttcccacacccgctctacgatatgagcctcctgaagaatcgattcctcaggccaggtgatgactccagccacgacctcatgctgctccgcctgtcagagcctgccgagctcacggatgctgtgaaggtcatggacctgcccacccaggagccagcactggggaccacctgctacgcctcaggctggggcagcattgaaccagaggagttcttgaccccaaagaaacttcagtgtgtggacctccatgttatttccaatgacgtgtgtgcgcaagttcaccctcagaaggtgaccaagttcatgctgtgtgctggacgctggacagggggcaaaagctggggcagtgaaccatgtgccctgcccgaaaggccttccctgtacaccaaggtggtgcattaccggaagtggatcaaggacaccatcgtggccaaccccaaggagttgaagtttgtgactttggtgtttcggcatggagaccgaagtcccattgacacctttcccactgaccccataaaggaatcctcatggccacaaggatttggccaactcacccagctgggcatggagcagcattatgaacttggagagtatataagaaagagatatagaaaattcttgaatgagtcctataaacatgaacaggtttatattcgaagcacagacgttgaccggactttgatgagtgctatgacaaacctggcagccctgtttcccccagaaggtgtcagcatctggaatcctatcctactctggcagcccatcccggtgcacacagttcctctttctgaagatcagttgctatacctgcctttcaggaactgccctcgttttcaagaacttgagagtgagactttgaaatcagaggaattccagaagaggctgcacccttataaggattttatagctaccttgggaaaactttcaggattacatggccaggacctttttggaatttggagtaaagtctacgaccctttatattgtgagagtgttcacaatttcactttaccctcctgggccactgaggacaccatgactaagttgagagaattgtcagaattgtccctcctgtccctctatggaattcacaagcagaaagagaaatctaggctccaagggggtgtcctggtcaatgaaatcctcaatcacatgaagagagcaactcagataccaagctacaaaaaactcatcatgtattctgcgcatgacactactgtgagtggcctacagatggcgctagatgtttacaacggactccttcctccctatgcttcttgccacttgacggaattgtactttgagaagggggagtactttgtggagatgtactatcggaatgagacgcagcacgagccgtatcccctcatgctacctggctgcagccccagctgtcctctggagaggtttgctgagctggttggccctgtgatccctcaagactggtccacggagtgtatgaccacaaacagccatcaaggtactgaagacagtacagattag

SEQ ID NO: 981 - protein, 585 aa, Homo sapiens [sequence omitted]

SEQ ID NO: 982 - protein, 801 aa, Homo sapiens
MHHHHHHIINGEDCSPHSQPWQAALVMENELFCSGVLVHPQWVLSAAHCFQNSYTIGLGLHSLEADQEPGSQMVEASLSVRHPEYNRPLLANDLMLIKLDESVSESDTIRSISIASQCPTAGNSCLVSGWGLLANGRMPTVLQCVNVSVVSEEVCSKLYDPLYHPSMFCAGGGQDQKDSCNGDSGGPLICNGYLQGLVSFGKAPCGQVGVPGVYTNLCKFTEWIEKTVQASIVGGWECEKHSQPWQVLVASRGRAVCGGVLVHPQWVLTAAHCIRNKSVILLGRHSLFHPEDTGQVFQVSHSFPHPLYDMSLLKNRFLRPGDDSSHDLMLLRLSEPAELTDAVKVMDLPTQEPALGTTCYASGWGSIEPEEFLTPKKLQCVDLHVISNDVCAQVHPQKVTKFMLCAGRWTGGKSWGSEPCALPERPSLYTKVVHYRKWIKDTIVANPKELKFVTLVFRHGDRSPIDTFPTDPIKESSWPQGFGQLTQLGMEQHYELGEYIRKRYRKFLNESYKHEQVYIRSTDVDRTLMSAMTNLAALFPPEGVSIWNPILLWQPIPVHTVPLSEDQLLYLPFRNCPRFQELESETLKSEEFQKRLHPYKDFIATLGKLSGLHGQDLFGIWSKVYDPLYCESVHNFTLPSWATEDTMTKLRELSELSLLSLYGIHKQKEKSRLQGGVLVNEILNHMKRATQIPSYKKLIMYSAHDTTVSGLQMALDVYNGLLPPYASCHLTELYFEKGEYFVEMYYRNETQHEPYPLMLPGCSPSCPLERFAELVGPVIPQDWSTECMTTNSHQGTEDSTD
